United States Patent Application Publication US 2023/0172999 A1 - sequence listing, part 2

SEQ ID NO: 3 - protein, 775238 aa, Alistipes putredinis (residues 1-387,619 of 775,238)
  misc_feature (457713)..(457716): Xaa can be any naturally occurring amino acid
  misc_feature (601231)..(601278): Xaa can be any naturally occurring amino acid
  misc_feature (612282)..(612331): Xaa can be any naturally occurring amino acid
  misc_feature (615805)..(615856): Xaa can be any naturally occurring amino acid
  misc_feature (657652)..(657699): Xaa can be any naturally occurring amino acid
MQVRFGGRYGKTYCRKAVRRSVPSLRNVATDQTYQLKISGPGIRTRSKEIEIKYVPGRIGNIDYYIPVERSADTVAFRPVETYRPKQIAPDARTIEDLYSHIPGITYEDGYLTDENGATVCLMFSGIIPDEAGYAAILTNLTADNIERIEYYRLDNLEEPYYDGVLNFVTVGVNFNAPSIKEQLTPSPGCELMRHPRLIPVLLLIIITSLATPLQAQIVLKGKITTEKNEPVAFAPVILQQLPDTTRYTEGVITDMAGNYRFGKHRAGRYLLSVRTIGYKTLYDTVLLRKPSIGMTEVVRDYVLSEDVAEIDAVVVTANNTASYFDRTVYTITNEDRKAAVTSLDLTNKIPQIRINRQTNQITASDGSVTVLVNGIASSEQELTTLRPEDVRKIEYYDLPPIKFGLSNGNKVINIITKIREDGIYGSVELNQHLTSPWLNDSFFLQYNRGRHQLAFTANIGYGSWDDQYASDEMEYTLDGVDFRQEEERQSENNFLSPQFSLKYTNQLPGKYVFQARFFPSYDKHSQQTDSRLAFIQDGIGSDRYGVKESESHSFNPTLDLYFWRQFRNRHELMITLRGDYINSVSDTYKNQYALSDDTPVFEDFLNMDGDGYQMNGQALYTKTFDKLTLSFGDYFYYDISKYRIDNTSGYSRETNSILKNYFAGEITGKIGPRFTYRFSLGVTGTRTKTNDNDIWQWVFAPRVDIGYRISPSFMLKAGFVQANMQPGLGQLSEATSFYNQNIIVHGNPELVGGRANQTTFNVVYHNKWLNINVSYSYLYYKNPIDYYYQYEQPYIAYSPINDNWADVHSVHYDLRLSPFKNDLLALKLGGGFSYTKVDSKVLGRVTHFQAPMYYELTFNYKNFSAYYQGAIPCKGLSIPMIYDSELSSAIGVRYKYKDWAFQLSCDNFLTNPESHYHSIENSIVRTQGTSYVKNAWNRVMLKINFRFGKGKQYQEPVRKTVEEGLMFTARKASVEDCGLIREMACVAFPDTYKTILSPEQLDYMMEWMYSPENLRRQMAEGHVYYIAYKDGTPCGYLSVQPEADDLYILQKIYILPRFQGVHAGSFLFRKAIEHIKQLHPAPCRMELHVNRHNKAVKFYERMGMRKLREGDFEIGGGFYMNDYIMGLEIMKFFIDTANLAQIREANEMGVLDGVTTNPSLMAKENIRGEEACRRHYLEICSIVDGDVSAEVIATDFDGMVREGEALAALHKNIVVKLPCTADGIRAVKYFAGKNIRTNCTLVFSVGQALLAAKAGATYVSPFVGRLDDICENGVALVAEIVRMYRYYGYDTQVLAASIRHTQHIVQCVEAGADVATCPLAAIKGLLKHPLTDIGLAQFLADHAKVNSMNRNEEVKPSFRAEFTPHKSTKKNETRTLLAGKFRKDPQETPPPRIIRPVTENRKQKSAARSQLSNLFRRYRMNFITLLDYVGTFAFAISGIRLASAKHFDWFGAYVVGFVTAVGGGTLRDLLLGLPPFWMQNVSYLVVSGFAFLFVVGLRKYVIRLNNTFFIFDAVGLGLFTVVGIQKSIAVGYPMWVGIIMGTLTGAAGGMLRDVLLNEVPLIFRKDIYAIACICGGLIYYLCMYLDLPAAPTQFIAACSVILIRILAVRYGISLPALKGETRPAPKEKMSFRIFLKYKYTQKYKDFTGLSKIIIFADPDGTTFCGMKHGNVKIEKTNAARLLDRAKIAYELIPYRVDEEHLAATHVAEQLGEDVAAVFKTLVLRGDRTGHFVCVVPGDHEVDLKAAARISGNKKADLIPVRELLPTTGYIRGGCSPIGMKKPFPTFFHISVLQHSVIYISAGVRGLQIRIAPQDLLRFVGGETAEISRPSSVAAEMKRLCGILLALAGLFLYAPCAAQNTRVRGTVTDAQTGEPIPYAVVLFPGTTTGITTDDEGFYSLESRDTSSYIRAEMVSYEPQIRPVHVGGYNQIDFRLTPSHLEIESVVITPGDNPAHPILEGIIRNKKYNDSKEYDRYICRTYTKMELGLANIREFRSKKLQQNFGFIFEHLDTSSVTGQPYLPVMISETAADYYHSRTPSVAREVIRASQISGIEDNSVLAQFTGHLHADVNLYENFIDLFGVKFASPLSNSGRSFYKYFLVDSTNVEGRKTYKIRFHPKSVATPVLDGEVNIDSASYALRSARVKMAKGVNVNWIRHLAIEADNRLTADSLWFPQREKMTADFTLTKSDSSKMIAFLGSHEVTYSDVKFDTPIPKQVLGTSASVILSDDAISGKQVEWDSLRPYTLTQKEKAIYQMVDSIQQVPLYKNIYTVLNTIIGGYYNTKYVGIGPYSKVISFNRLEGARFQIGARTTKEFSRRVRLSTYLAYGTRDEDFKGAAEVELMLRRQLLRKLTVTYRNDAIQLSSGVSALSENNILSSIFSRGGTSRLSTIEEGIALYEHEWLHGISSSFELRGRHISSNRYVPMILPDGRSLHGINDASIRIGLRLSKDETIVRMPFEVRHMGSKYPIFSFDFTGAKRGVLPASYDYLRLEGRMQYRLNLPPVGYSRLMLEGGKIFGKVPYLLLKLHEGNGTYFYDRYAFSCMNFYEFSSDAWISFFYEHHFNGFLLGRVPLLKKLNWREVFVFKGVYGTLSARNDGSLPNTKAVMLFPVGMSSVEHPYLETGFGIENIFRLLRVDFIWRLTHHRPIPGLSIPTFTVNFSLNLKFMIRGVLFDMDGVLVNNTQAHVKAFEIFCERYGVEDWQHKLQTAFGMGNDDIMRLILPEEIIREKGMKALGEEKEAIYREVYAPEIRPVRGLVELLEELRRRGIRCAVGSSGCRENVDFVLSNCGITDYFSCIVSGDRVTRCKPDPEIYLLAAEGLHLPSAECLVFEDARVGITAARRAGAGRIVALATTLPRHTLATQTEADVVIDDFASITDLNALLLMSRALATIALLILSNTFMTLAWYGHIAFKSKIERFGMLSIILLSWGIALFEYCFQVPANRIGSSQLGGPFSIWELKVIQEVISLLVFTVFAVVFMKSDTLRWNHLAGFVCLILAVYFIFRKMIYWLNFVFHVPQNRQAVSEPVGSEEGHCAAPKRRRRPPEETNVRSGERLKRSPAKAGMKKFFTLLVLAACCAAMTWGCSDDKYDDTEIRQEIENLKQEIASMKEQVNSLKTIIDALNENKFITNYTEAADGSCTITFNDGKTITLHNGKDGAAAPAIGIAQFEGIYYWTLGGDDQWLLDDNQNKIPVAGQNGKTPTINKDGYWEIDGETIKGEDGQPIKAVGKDGANGDKGEDGDSFFKSVVQDDESVTFTLTNGDQIVLPKAKEVNFVIERTSLTLKFGASQNLAVTQKGVENLAIAKPDGWRAWLEGDVLTITAPAKENVYAETSGEVSVVAVGATATVIAKVQVLATDEILGGAGAGSSEWEEWNMKNYLYILCAFLLAFAGCTKDADVEPIAPAPDGNTQVVLTGFSGRGTRTGFGGAEDGAVPFLWSAGDYIWARNTRSEAIAEGGSQATFVFESLETADTYDVFYNLTGPAAATALIPAEQTQQAAGELNLGQNGDFGYATAQNGTFTLEHATSYVWFDTYSSDVTSNLLSITLSVSGGQTIAGEAAFADGKLGDCKGSSSVTLSFGEEGVALPSQSNDTDVFAAMVLYPADLSTATVSIVYKFADGSVYLQTKSGKTLTPGHTLRLSTQIAKSDCKNSGAFFMTEAGVAEELPTEPIGYLKVVTLGESTLSAEELTSIAGNLANGAVIDLGEATFATTEFPMDFTRKTNLQEIALPRNIQTFTPSTYNSGAFYGCENLTRVTFPEGLTAIGQNCFRNCAKLESIELPSSVRTLDIYAFYGCKLLTSVVIPEGVEAIPRFLFDSCTALTDVTLPSTLKSIGAEAFEATGLEEITIPESVTTIESSVFKNCKSLERISFPMHMPSKLETVGNDAFYNCGKLQDVTFPETLKSLDERSFGGCSAFTRIIIDIPAIANYAFWNCANVTSIDLGEKVTSIGRNTFIMANNLQTITCRAKNAPSLGSTAFGSAGSKVEGKKILYVPAASYDAYETAWTDVTSQGYALQDINDQQLTDGIYYRASREADWVPTLPATFTALYVRTVGDDAALTASQFNTLVTKISAQSAPVTLDLSMAKFEATEFPVSLAGNAKLGTIKFFENTTSIAAGAFKGCTALTKATVPTGVEIIGESTFEGCTALASLTLPSSVKTVGDKAFKGCSALVETSLSAIENIGTEAFAGTGLTSAKISATTLGEKSFRDCTELTAITLGSATTIPAEMFAGCTSITTVTIPKSIETIGTSAFDGCSKLATLTLGTGVTTLGDRAFADCGLTALALPDNVTTLGDGAFSNNPNIATLQFGAGLTAISDNAFATNNAIESLTIPKTIATIGAGSFANWSKLTKLTISGNTLTSIGSKAFENAALLADVYAEPTTAPAVQADSFSGAGTSVQGSKTFHVASVEAYSSWTTAASGYTMEALGPDYLSEGLYYRASGEDPWKSEIPQTFTTLYVKTAGDNTVMTTAQMKSVADAVLALAAPATVDFSEVVYESTTFPNSFKSNANLAGIVFPQNVTATASAAFQKTGMTSVTVLKDISYGSNAFDSCASLVSVTVEEGVTEIGNYMFQNTKLTSVTLPNSVTKIGASAFNGCSLTTINFGQGVKTIENSAFQNCGELTEIILPDATETLGQNAFGDCPKLAKISLGKNMKTLEAYCFVGYSKGCPLLGDIICRATTPPTLKDDYGTGPFGGGWSPVAGKDVPAENRIIHLPKSADLVGGTGAYADSSWVKLTSSTYGFAFKYDVEGMSAILPGLQAFSSAFNRIAMKKLLYILAGLGLAACTSDIEELPEVGPQPGREVALTGISGTASRTQFVPGDGTEIQFQWSTGDRIWAGGVQSAEAGTDGNVADFGFTNLPGDAPYRIYYNMTGTDAEAVVPTEQRQAEPGKLQLGPNGDFGYATTDSEGRFTLSHATAYVWFNPWSQDVKEKLVSVTLAATDASTVLTGTRTFDGTGFSDATDANNAVTLSFGKEGVELPATSSTASVFAAAVVYPADCSAEEIHVTYTFADGSVYTETKTGRNFEAGRIYRLTTEITKRDGGSLEIQGLEDSDEPVCMKYGASEAYALTAGGWIPTVEMTSAPAGWTADFDIARRSLLIAPPAEYTDGMDLENTVTIQSDDKPILSQEYYVLDFTHPEGTFVLIEGNMTSENGTIVYFDQHMRYHEKVYEEINDNEIGNVLQDMYLANGKIYFITQNGKTSSMGTTFNGDGRFVVCDAHTMKRLVARDMPFYANIDTSTGATQSSKSTLCWPQHIVVVSPEKAYIQYSTADNESHSGIRIVDLQTNIIRTSDIPGTFGVFTKTGATKARMIFSRGKVFAGRGNSVIVLDPATDAVIKTVTYENRQVKDLAKGYDGKIYAIFTGEFTGNSGMTGAASFTKPAMIVALDANGEVVSETNLPEQIELRTGTASPTVQMCASFTQPHLYFIGKQDFSAYEAMRYNYETGKVNWDYITADLDADHSGGDIIYGYMGVHPTTEQLWVGKSTYTQSAVHVYDVSRSDALEFSSFYQKKASPAGVDFAYRFSDEWINRMFNGLKRGIVICACAALAVSCMDYGPIEKEDFEIDNIGSGDEVTGKGLFITNEGNFMYGNASLSYYDPEKKHVENEVFARANAIKLGDVAQSMVIRNGIGWIVVNNSGVIYAIDINTFKEVGRITGFTSPRYIHFLSDEKAYVTQIWDPRIYIVNPKTYQITGYVETDMDFETGSTEQMVQYDKYVFTNCWSYQNRILVIDTETDKVCDQITVGIQPTSLVMDKYNKIWTVTDGGYEGSPYGHEAPSLYCIDAATRKIEKQFKFKFGDWPSEVQLNGTRDTLYFINKAVWRLPVTADKFPVKPFLPYNNTLYYGLTINPVNSEVYIADAIDYVQNGVVLRYSPDGELLDEFYVGIIPGAFCWRMNKIRIYFILLALTAVACNKDELITTDVEQVPIITFDTDPAVYPVKVGREFTITPSYQFVDRAVYSWKLEETGKIISTEPQLTYRFDSGNEISEGVNGYYIDLEVTTPNGTTVETVLVEVQELLPPLISFPMQTDGLEVVKGRKYEFAPTVQSAENSTFLWTLRRPGAAEAEPVGDEAVYEFCEEIAGTYEVSLRTENEDGSDEMTIEVEVVDALAVSVTAVPIGRKYDGLTRTVSLDRTITLRPFIWNGTNPKFSWTIDGQEVGTELSYTYTPTETGIKKIVFTVTDTTDEPEMTLSKCITRTNETRATLEFTVECHSEEESHRRPASGASSATWDRVYEYTPAPGQFINELVSGGFTGTETSPEAAVAYAEERMKKNTWVSLGGWGGYIVVGFDHSIDNSSSGYKGGYNFSITGNAFKGSSEPGIVYVMQDTNGNTLPDDEWYELKGSEYGKEETVQDYAVTYYRPTYSGADVQWKDNQGVKGKIDYLKQYHDQPSYYPAWIGTDSYTLYGPCLKSRTYDQSGNGSYWVNGEYDWGYADNFGNDRLSEDDNAAAGAMKVYFKISNAVDKNGQPANLKYIDFIRVQTGVNAKAGWLGENSTEVFGFTDENINQGKMKITGIICCLALLCTACSEEKTELPWGSDNYIVSFSLTTGADTYPAVIRDGRITVSIPYNVSLEDAQVSYELCEHASIYPDPATVADWDQEWQFLVSSYDNQNDRTYLYTVERTDIATDGSLTLRTQAEVDAFARSGINTVEGNLTIGGEDEENPVTNLDGLKNLVSVRCDLTITAAYTGETLAGLENLTACESLRIGSAAHPNETLRQLSLPALKEIKGDLCVYGTALQTADFKSLQSVAGHFVLQSDALLQLTADELTTVAGNMTLIGTTADEAKAPCEQMYFPKLQRIDGTLTLSRFDRLSGLGTTFGVLTQAGALRYEHLALANTFEFPLIETTGNITVTDCPILRSVLLPALTDAGSLEITGCPAIETLSFPKAERFDGDVSLATLPAIKDFGEFLPALKAISGDLSIDDLSSLEGVLDLSGCTFSPNSTLDLRLVAATRLTELRGGDFGGSLRIDASSLTPQPEAMPFGITGFKNLDTLRIAGFTHVSELSLPTESCDDLTIENCGSQAPFTLSLPNLVEVRGTLLCRNCGKAGEANSASFPRLKNVGRQLSFYVGASSFTVLEFPLLETVGNGEPVSDDPADDYALYTMPSGCAGEFILPSLQRVNGSMLVSTWNTSTDRAVAFRFPSLQSVAGEISVGHTAYKNRSVATLDFSALTAAGAIRIGNLSSVTDFSTFTQVLPRLSEQTWSVTDCSYNPTYQQMLDGETGAESKMMKHLLTIVLCLTTLTGLAQEEKIKKSEWWNGNPSYAVPIREVNVTARRPMKEIGIQKTQLDTTILHENIALSMADILTFNTSIFVKQYGRATLSTVAFRGTSPSHTQVTWNGMRINSPMLGMTDFSMIPSYFIDDASLLHGTSSVNEAGGGLGGAVKLSTRPADADGFNLQYTQGVGSFSTFDEFLRLTYGNDRWQTSTRVVYSSSPNDFKYRNYDKNVLILDDDHNIIGSYYPIERNKSGAYHDFHALQEVYYNTGHGDRFGLQAWYVNSKRGLPMLSVDHKENDDYLNQQREQTLRSILSWDHLRKKWKVGVKAGYIHTWMAYDYERELGNGKMEKMIRSRSTINTFFGQVDGEYYLGEKWLFTATVSAHQHLVRSIDKNIIPMDNQQPTDPNGNKTKVPVGYDKGRIELSGYVSIRYRPTERLGLSIGLREEMFGSEWTPIIPAFFTDYLISKRGNLVAKASISRNYRFPSLNDLYFLPGGNPDLKKEHGFTYDAGLSFATGRDGVYTLRGEATWFDSYIDNWIVWLPTAKGFWTPKNVKEVHAYGVEVKAGLDVQLAKDWQLSADGNFSWTPSINHGDPVDWYDKAIGKQLVYIPEFSASVTGHLTYRSWRFTYKWCYYSERFTTSDNDMKTKIGRVKPYFMSDISLEKAFSFRWADLSLKGVINNLFNEEYQSVLSRPMPRLNYEIFLDIRPKWGKRNKKQMKKLLYILLSAILAAATACHHRSAASLGDFDISLYAPAYSSGFEIFGAEGMKSTILKTYAPWQGAEGEETQLFIARNGEQAPADFPGQVLDGDARRIVCMSSTYIAMLDALGEPQRVVGVSGIDYISNPYVASHKEQIGDVGYDGNMNYERLLSLSPDIVLLFGVSGASAMEPKLRELGIPYAYMGEYLEQSPLGKAEWLVAVAEIAGMRERGEEVFREIPLRYDSLKTLAAKAERKPVVMLNTPYGDSWLMAPPSSYVARLIADAGGQYVYTQDTGNQSRPIDTEEAYRLAEMSDCWINVGSAASLKELAEIVPKFMDTRPVREGRVYNNNRRTNPSGGNDYWESGVIHPDLILQDLIRIFHPELTDAEPTYYRKLNMQRRQRILFLLFGVLAAVLFVVDLSVGAVPIPIREVLAALTGSGNDPVTTKIILNIRLLKAVVALLAGAALAVSGLQMQTLFRNPLAGPYVLGISSGASLGVAIFLLGAPLLGLTGHPLISTLGIAGAAWIGSALILMLIAAVSRRIKDIMVILILGMMFSSGVGAVVQILQYLSNEAALKSFVVWTMGSLGDVTLGQLGLLLPAVVLGLVLAVAVIKPLNLLLLGENYARTMGLDIRRSRQLIFLSTTLLAGTVTAFCGPIGFIGLAVPHVARILFADADHRILVPASILTGIVVMLLCDVLAKLLTFPINTITALLGIPIVIWVVIRNKSIVMIRLNDLTIGYGHRILLQHASATIPAGELVALVGRNGTGKSTLLRAIAGLGERLGGEIRLDGHSLETLSPQQLATTVSFVTTERVRIPNLRCEDVVALGRAPYTNWIGRVQEQDKAIVERSLELVGMAAFAGKTMDRMSDGECQRVMIARALAQDTPIILLDEPTSFLDLPNRYELCTLLRRLAHDHRKCILFSTHELDIALSLCDSIALIDPPVLRYLPTPDMACSGYIERLFSNSFVTFDTESGTIKVRKMEPNVLKMHSRATNIKNNGRFLKFPGLYDNRYFTILFLIICPGAPIGSDRYALTFLFESFFEEEGMGHVEMTIEKLDGTSPRLYTLVAPLVMRRSVLRQNNNYPFWTSRSHTWFVAWEGETVFGFIPVEITDGGVAKINNYYVSGDDPHLLSRFLREIIQYYRRDYTIRSMTLIRHAEIFRSEGFVPMKEWTQYVTMEYSKNRMNVYERTQQRLKTVFDLFDNIYVSFSGGKDSGVLLNLCIDYIRQHGLQRRIGVFHMDYEIQYRDTLDYVNRTLAANADILDVYRVCIPFKVQTCTSMFQQYWRPWDGSMRDIWVREMPEGSLTQHDFPFFTDEMWDYEFQNRFAEWLHRRSGAKRTCCLIGIRTQESFNRWRTIYSDRNHYRFAGKRWIRQWVGSGICNAYPLYDWLTTDVWTANGRFGWSYNRLYDLFYRAGVPLDSQRVASPFISPAIASLHLYKAIDPNTWGRMVGRVNGANFAALYGRTTAAGWQSVHLPQGMTWESYMHFLLSTLPEPIRRNYLEKLSVSIRFWRDKGGCLSDETITKLQKAGIRIEVGDRSAYRTDKRPVRMEYLDDISLPEFSHLPTFKRICICILKNDHACKYMGFAPNKNETQRRKKIMEKYESLLMNRYSESQTKSAYRSPVYNVRAVPVEKVVANSYNPNVVAPPEMKLLELSIWEDGYTMPCVCYYDAERDRYELVDGYHRYLVLKTSKRIYERERGLLPVAVIEKDLSNRMASTIRHNRARGTHNVELMSEIVAELTRANMSDQWIMRHIGMDRDELLRLKQITGLADLFADKEFSLGDTDEDSVEEMLEVMAAVCGCAFQAIACTGIALTAADGSYVQSRTIEWARGVLQSEYVVIPRGQRLRSFTPSGADGMVFTSKYGVVGLAVVQKEFIAEGINEAGLSAGLFFFPQYGGYEQYDPAQSDRTLADLQLVAWILTQFSTIDQVKAAIASVRVVGLEPSSVVHWRIGEPSGRQVVLEIVGGVPHFYENEVGVLTNAPGFEWQLTNLNNYVNLYPGDAPARRLSGITLRPIGGNSGFLGLPGDATPPSRFVRAAFYRATAPQRATGFETVQQCFHLLNNFDVPIGIEHPEGECPDIPSATQWTSAIDLTNRRVYYKTAYNNTIRCIDLAQIDFGKSSYQSHPLDRIQEQPVEMVVLPEMAGINEYPLEYRRMIYKRIEAATGESAEKIEKAYFKKLEKILKRGVIKDREEYELVHSRIDELVHNTPEDDPARKDLPELERIFMNYAIGEMYKALTEVFQNYGKIFFKGRKNGLTKPMRKRMSAYCELWTKKMYFVKAIISFNVSLSDGRGIVSENRSSAIRVRVCTSLYLMGFVPFTFIDFIDIILVAAIMFWIYRATRGTNAPYIISGIIMIYLMWVVVRTLNMELLSNILGQFVSVGVIALIIVFQPEIRRFLQMIGMRQKRFNFIARIFNRNDNTSVTIIAPIVQACREMSAHKTGALIVIGRQSDLRLITEGGIAIDAKISTPLLENIFFKNAPLHDGAVVIEGDRIVAAKCILPVTQSDVPKSYGTRHRAAIGMSEISDAIILVVSEETGGISIAHGGTIHRDIAPDQLANLLQRHFGANRQKDRHATMGSMLLPSPTDRLILRCWQDEDFPAFARMNADSRVMEYFPAPLSLPESAAFFDRIRREFETERFGLYALERRTDGELLGYTGLHRVTFDGPLYGRVEIGWRLRSDMWGNGYATEAARSCLHYASLSKMESIISFTALSNLRSQRVMQRLGMTRLQEFDHPALPTGHPLRRHVLYMIRTNGYAETEPETRPENLRMLYTLCIILILVASILIILAVLVQNPKSGMAANFGASNQVMGVRQTSDFLEKFTWTMAVVIVVLSLLATLAMDRGLVARSNVELEKDANALMEKMIVEDPAPAVPQAELPASDQQPAPAAAPAEMADFKEYTMSGGTVGPVDEAQLDALVGRYEWFTPARILRVLQTGRSDRRVSIAAVSRLLPLGRFTVDREALCALSPADLIDRFLKEGGHRIVAEEGEVVEEVRTEAELSGDDDLVTEDLAEIYLAQGLYDEAIAIYRKLSLLNPEKSVYFASLIDKIANKMKAVLKYAIVVAAGLLLAGCGYKVNYSLSGASIPPDAKTFSVAYFPNNAPMVAPILSSTLTDALRDKFTRQTRLTQVDEGGDFAFEGEITGYTSTTASVSGSSETALLNRLTITVNVRFTNAVDESMSWKKTFSAFEDFDSSKLLNEIEGELIPQIVDKLVTDIFQASAANWMTDLTSIKNRFGIIGNSEALNRALEVALRVAPTDLSVLVTGESGVGKEFFPQVIHAYSARKHNKYIAVNCGAIPEGTIDSELFGHEKGAFTGAVEARKGYFEEADGGTIFLDEVAELPHSTQVRLLRVLQTGEFIRVGSAKVQKTNVRVVAATNTNLQDAIQAGRFREDLYYRLNTVPIQVPPLRERKEDIFLLFRKFAADVAAQYRMPAISLDPEARQMLENYYWRGNIRQLKNVAEQISAIEEARLITPAILTKYLPAQSQSGASTSMSTALHSGPGDGVSFERELLYKVLFDLRADVNDLKRMLTELMQRAERPAEPTKDLAGLLPASAHSIASPDYTESEEVVDEQPSRELTKADVLREQILRALRRNNGRRREAAAELFMSERTLYRKIKELGIDENSMLTGIITNYLTQHRRLVVPQLGTFVVKVPEGGVVFSELLKRDDGILRGLLVQQGGMNDLEAAGAIDRFVFEVRHALEHEGAYAIEGFGRLTLSPGGAIVFQAVLATPVAAAGPVVGESAPEEGNKISSAAALHPASVAASAESVAPRVRSRSEAKASPVIDGGISEPRISVSAKRKPAPYVKGLQYGKPLKTTEGYTYVGSKPRRRIDKFMVIAIVVAVLAVGVIVYGYLRRAKIERLEREYLEQLAPAVPEPVAAGTDGGVESVPDTTQEMKDKYIDLIEQTFDFPQDEFTVEDNELNFHDIPLMELIKQYGTPLKITYLPKISQQINRAKRMFNVAMAKVDYKGTYNYCYCTKSSHFSFVLEEAMKNDIHLETSSAYDIHIINALYDSGVIDKDRYIICNGFKRPQYVENIAQLINDGFENTIPVIDNKEEIDLYDDAITQKCKIGIRIASEEEPKFEFYTSRLGIRYNDIINFYKTKIQKNKKFKLKMLHFFINTGIKDTAYYWNELSKCLNIYCELKAICPDLDSLNIGGGFPIKNSLDFSYDYEYLTEEIIAQIKNICTRNGIDEPHIFTEFGSFTVGESGATLYSIVNQKQQNDRENWYMIDSSFITTLPDTWGINQRYIMLAINNWDKEYQRVLLGGLTCDSEDFYNSESHINAIFLPKLEPGNPQYIGFFHTGAYQESIGGFGGIQHCLIPAPKHVIIDRDKDDNEYYTRLFAKEQSYRSMLRILGYMKQKKKFILITLSVITILLLLGFGTTRCYLSSKYKKIAERMRSDYKAAPNQQQLPLSFYLTFGYFPRSMDEALDFYHREIQPDESKETLRAQQVLQDPFSRDSCEIQYVPLYDYETKKPVSFILLSAGVDGKMDNKITPSDTLYLNNWWAKLDVYNYEEAVLLQDYWIKWEDLCRAYGEDIEDIETLLKYNPPYPELALHFTMRNYLWGKKDWIIQLGLLEMVAGVALPQNPNSAPFRFSLGYHNITIPGDRSHHAPVPKHVIIDRDKEDNEYYTRLFAKEQSYRSMLRILGIDGNGFSDRKFRNVRHRYESTGFLQSFRGFTKQCCNLISYGVVFLMDCVLMETSAYKEMQAHLQRLLERVSALHSLSAQPTTVRRLTAEEVCKALSITKRALQYYRSAGIIPYTALGNKVLFRDDDIRQLLEKNLIKSLMTEEIITRDSAAFKELRRDIVKAIRAVDILIDTHRPTIGNELYLTSEEICSIFSISKRSLQNYRDNRQIPYTTLGGKILYPQSSLYKLLEQHYMKAQRMATFEEKAERLKKELEEAPNGDQRRNLSHEYELTLRLLRIIRGEVFTLDDINKCRMEIMRQYPGYERPITADSGILLAAEAIRKSFGRKYYLPLYKYPILIDFGTPDGQICVIHPSNYISYTSKKEGEEMGYLMLSELAYLRLPFGLTIERDIYTARKYVRDFLPQDEMTLLTKQIISKFEKHPIHSQDGKGMDAEVLVKYFNPCGSGTWLITEAEREGDDWRLFGYCHIHEWEWATMICFVSSVIENKISDCPERPDSKSRIAAVSDKDKALPMPLRAYIEDKEIVSIDLNDEEWSALKARLKAKEIVLTLPCCGQEGFLRTSNRGLKHFVHLKSANPCDWKPESAEHLKAKVAIMEACREQGWNAIPEFSEADWRADVLAVQGGKRIAFEVQWSRQTYEATRLRQERYKASNVRGCWFFRIAPKEMSDYDKTLVADKETPAFKIFKDENSNILAQVGKVQMPLKALISNLLARKLKFCEHIRIAPKQKITIIFFEMKCWKCGTLQYCYTVEPSLKSVCNCDFDVERSSWDDHDIDKHPGVYAAVQDFLQTEEGRQLKVGPVKKRYSRTVADSYLSHGCYYCDAIFGDFHLIEEKLYAFTGVYTIIDNALMPKPIWWILRVFQHVLLFLLGLYFGMKRATIHTSAAIALLLGLAACTQDEAGFLPEGAEGTPIVFTATGLNPAAKAIAGTRAPADGNWEGVQSVAVLMDGMVKTYDVTPSTADPASATLTSTDPHYWTNHNNITVTAWWPYTDGETTPPAVKVKANQSTQKDFEGSDLIVADGQTVTYGSPTLRFTHRTARVTIVLTDYTEGLASVRLTGLSTEGGNPAEITLYDKGSNTYTALVAPQSVAAGTTFITCTFTNAKTFVYKMKNAADWQAGGEYTYTVSLAAAKDPGYTIEGNGSYTVTSADGLINVAELVNGGKTDINITLGKNIDLTGKGWTPIGTNYEKRYKGTFDGRGHTIKGLTVTTNDQFVGLFGYLDRAGTVKNVVMEGIQITSNHVLMSGNTGGVVGYSWGTIENCSVSGSVSGTNCVGGVVGGQQSSGSIIGCSSSATVKGTRHVGGVVGEKWGTMTACYATGNVTLEINSPLDLSGGGVVGLNGGSTVLACYATGNVNSKGRSTGNVHIGGLFGDNYTAVTACYWKNNQEQGIGRNQQSTAPEATKVDGSVVTWQEAVDAMNTALQNAGSEWRYELKGALPTLRKQMRHRLFIPAATALLFALAACTQDELAGDNRLPEGEYPVFIRATGLSVEATPLAASSTRAAVDGDWQGVTSVALKMGDAVKEYTVTASTDFKSATLSRENDPYYWTSRDPITVSAWWPFNNANITQMPAVKVAEDQSKLADFQNSDFISAENRKVEFNTPTLEFTHRTARVTIELKPGTGFTSVAGATVSLVSLSADNGNPTAIKTYNASGNTYEALTAPQTVAAGKPFVKVELGSGTFYFRPQNNVVLEAGSRYKYTVKVNATGLTLEGCTIGSWADGGGESGTAEDLGYIYDSNTKTYTVYNADGLLAWNEASQKDESINCTLAADIDLTGKEWTRSGIFTFYSGVFNGQGHRITGFNSSAMNNTGFLGSLLSERGVIKNLQLIDVNLYGSSGNTAGIVGRNHGQIIACSVTGKISASYGGTCGIAESNYGDIIACWFDGTLKESNNGAIVRYNYADITSCYWGGNAGQGVFRIEGGTVDATKVDGATVKWQTAVDGMNTALTAGDYQWILGTDGLPVLQKRQMKTRFFALAALALALVACNNDNENLNGDPVAAQFTADIAPATRASGTTWTAGDRIGITDIGNDSQYGNVPFILKNGKFEAEGKVIYIEDTKTHTFRAYYPYNAVGGILTATTDATAQQNKPAIDFLFASGATGDKNNPVVSFTDKTAKGGEDNSFHHRMSQITLTFEAGDGVDFSVVKPERYTLNGLLLTGTFNTVDGIATADNGAQTGELAMNLADGNLTSSIILFPQTVASLPLVVNNKGQEYHATLTVPEGALQAGNNYTYTVKVRNKVLEVSEATIAKWNDIDGGEVGADLMAAAVLLSSCVKDTLYDTPHPDSGKIAVTADWSARGEGIDIPATWTVTMGDYTGTETSATHAPDHLFAPGSYTLAVWNPTEGITVNGTTATIAAATGTRAGTDTFVNNAPGWFFTYTEQVTIEKDKDYPLTAAMKQQVRELTLIIKPTGDAAGRITEIVAHLTGAAGTLDFATDTYGAASNVVLPFTKITEGDDAGKWKATVRLLGVTGTEQLLTGEIRYADGNPSPTTLKSDLTEALKDFNTGKGKSLTLGGTLVETPEGMEVDGAEINGWEEVKGDDVNADLMSRKITFLTLFLWLMTVTFPVIAQQKADTTYTFRFVPQKDMFYVPWNGNDTELARLLECIENNKTTILDGKLPLLVDGYCNSLGSEAENLATAKIRANRVKSELIIRAEIKEENFITRNHATEGDFVTVRLTVPVKGTAATDAEARRKAETERLEAEKRAEQERLAEEQRKAEEARLAAEKAEAEKAAQQNTLADTPSETKITTDYHLSLRANLLRWATLTPDLGVEWRICPSWGIAVNGSWTSWTWSDKDRRYALWEVAPEVRYYMGEKKAWYLGALFKAGQFNYKFSEAGKQGDLMGGGITAGYQLRLNKALALDFNLGLGYLNADYEKYEVIDGVRVRRGNETKDWWGPINAGVTLVWKLFMKSAQTTIFIKRCISTEKVFVIFWALNGIYYLWRRQRMLLPGGAVQNVALLALAAWLVIYGLVLARRVIVAYRRAVRIFDDTHADDIGAYIEWLSTFTYWALIFGVGCGLLTFLPDKYVYIWVFSSILFYSYLFHCYQNYLLFYEQVENAFEQDIQSEEELLTNSGTEPEMVSEEEVPVSYTEIIEKVANWIKTDGYVQQGLTIKELSEILHTNRTYLSAYIKTTYKMTFREWITGLRLEYAKNILKEHPEINIQKLAESSGFLSRSNFIKSFTEKEGCTPGKWKKANLEMSPFQAVAYYLSILRYNAFSYISATLRRNEAGFITVNEVLLESNSITKSFVIRSRTLILNSFSVSVRMVCEMEGVALYSYRRLSAANKEDGRGVRAGNEIAKHFAGNNVDVIIYAVEKSLDSYKFNLLHCKQTFISQLKSGALGARTIDEGAMDEKSGMNFSEYMALLSGNTDLLDKAKLEKKIASLEGERKSFNKGKRDSEFKLEAKTGNCATTRRSSMPMTEDWNRFLSVVKTDKEGNRLNAVKEDGISSSDEKVIGKRLQEIAKNATTGGLYNPVGELYGFPIKVVSERMLKEGLEFTDNRFVVEGNYKYKYTYNNGHLAMADPVAAARNFLNALEKIPSTIDQYKAKNEALERDIPQLQKIAGKVWKKEDKLKQLKSELAALDRKIQLELAPPVPEVAEKENDGQEVKPDTEGVRNVPSQPTEDAPQIRSPANDRSPSGNFIADHIVIGRAGFVCKPKGIKMMESSIYSYSLCIALPLMSFFGFYFLLASTPEKAIFNNYLRSRRIMGVAILLLAANYSVHFFFGIRFKNTDAAILMNLATYFLCYWLFSSALTTLLDRFYITKRRLRTHICLWILFSILSGIVLLLLPKGGLQTTAMFALAAWLVIYGLFLTRRLLRAYHRVIRIFDDTRADDIGAYIKWLSIFTYWAIIFGVGCGLLTFLPDEYIYIWILSSVPFYIYLFLCYLNYLLFYEQVENAMEDGMTSEEEDLCDTHKPGTGTEAGYPFFHAEIAKKIKGWIDADGYIRPGLTIKELSDVLHTNRTYLSGYIKTTYDMSFRDWITGLRIEYAKRLLARYPRLTIADISEKSGFLSPSHFIRLFKENAGCTPVKWKKTEAEMSKRILFFILFSWLASAAFPAFAQQKTDTVYTFRFVPQKDMFYVPWNGNGQELTRLLECIESNKPDIVEGRLPLYVDGYCNSGKSERASLAIAKIRSNRVKSELITRKGLRENNFITRNHASDGDFVTVRIILPKEKVPAIVEDTHPGYEEEKEQSLRENDKATETIQDAEETKASFGQENQPESVLPASSTTLGLSLRANLLRWATFTPDLGIEWRINPSWGISVNGSWTSWAWNEKDRRYALWEVAPEFRHYIGKEKRGYLGVMFKTGQFNYKLSATGKQGDLTGGGITGGYQLKLNNALSMDFSLGLGYIHADYDKYVVINGVRVRRGSETKNWWGPVSAGVTLVWNIFMGAYGKAYTLLYLIGAVTILTSCVKDDLYDTPHPDRGAVVVTTDWSGKSTEADIPQAYTLRIGGREQNVSAATNVFDALLAPGGYGLTVYNSPEGISIDGNKATVNPVDLTGAIEPHPGYLFASHQDISVVADDTLHVTAPMRQYVRRLDIELTATEGDYSRVQSATATLSGVASAADMATGDRSVAAQVTNAFRQDDNKFTIFFRLLGIVPTETHTLTVDITFNNGDTQRVVSDLTEAIRDFNNGTKPVKLTGNLLLPVEAGVTGATITGWNEVESGNGDANMNMRFFIIAAAATLLAACTQENEVQNNPVEARITAGVSGPKTRAVDNGWNADRIGVMVVDAPGTTTTMGGKYKNVGYATTSTGTNADFTPMTAGGGIFFEDAFLEFTFAAYAPYASGANASTLPGTDGKITVNTSNQPTTTEQEKVDYIHATGAKADKDSPTVSFTDNTAAGGSDCSFKHKMARLILKVQVSNTDGFDDTAVLEFADYKLGGLVHEGTFDVKTGTAATAGSVVSDWMLRQCTGAPKTATDKCVATFDAATGVMTFTMILLPQTLANALVLEISPDDGEYQSYSNKDMIKPALEAGYSYTYTITVKKTGLTLSGSTIENWNDGGSHAGDAKMMKIIRNIARRPWPRIGDWLPVVMLICGVLASCSSEDESTAPLPDGKYPLQLTAEVAQPQTRAGGKDAWTGGEEIRVSLEGVFGNKTYVMDASGNASPKDADNAFYWKNTDEARVSAWTPDIESETDISDQSGGYAAFDVLYASAIGRYDQAINLRFIHRMAKIEVILKAGEGITEEELEGATVTIFGDPLTHSTAGLVAPGDQSDGEIKPYYDAATKKYEALVPPQNMTGKPLVRISIGSNDFTYTPETEAAGKFDFFGGKRYAYTITVKANGIDVQSVTSGTWVANGEENVTSKRVKQRFTADELKIGDYFYSDGTWSDGGLRKIYADGSMHIDYYKPGPLRGKTVVGIVFQTDKSRIGKKEKEKLGGEDKVHGLVMAVKNANAAEKVIWSNESRYLDLLNDCVSKSNNYSDISGYGNCESIRSLEGNFDKYPALQAVDGYNTTCPVPTTTTGWYLPSSGQWWDILQNLGGCPALADGYQQTSSDINEFFWSNQGNVPDALNKWMWGIDGWDKFSYYHQFWSSSKFKGNTMRYWVANSDDGWISCRWGNVNFQLYVRPVLAFMKIQNIYHLLQAALLLLLAASCTQEEFPAAQDKARQLTISVTDGGYNTSAVDGKITRAVENGYTTEFTEGDACGLFMVRGLYSDKKMIYSNVKLTAERDAATGKLTWKPEAGTTLEGGLSDEEYYLYYPYKADLDDTVISKLLEYAIMNPQLPFFYPLVNRWPVEVDQSSYADYTASDLMTASCTPTLENGKLRLDFVMAHELPLVVIEMPKTVYKFTDARIPDYTVPSAATFTSAAEPLRMADGTYRYLVPPSMPAIWGSYDDGDREFTINTSAPHPIKGEYKRYKVDGAVETIRNYILQVGDFFLADGNLMPNYAEADEVRTVNVVGIVFQTDPSRIGQAEKDKLGGNVHGLVMAVKNATTFQSWGLFGTDEDLAKCETKARNYSDISGYGNCEHIRANRGNFDRYPAFKAADGYNTTCPVPTNTTGWYLPASGQWWDILQNLGGCTALAKPDEQASSQDDDFGWSGQGDVPAALNAWMEKIATDSKDNFRSGRWFWSSSEYSEFFARYWYVQSNGRVGCYWDRKDGSSVGVRPVLAFMRTDCMLGVLGQRYSTIIPGGEIDTLRRFLAEKDTILVAIMETHREQWKRAAMGKRLAKDLPGAVKEATRRGSEKTEVLIATVAESELSGSVITEPGMKKILFLLSVAALLLPLDSSAQSKPKIKSVDFTIQVPTPGMSLFDAREMQFTSAKTEFGDLAATGGIQVQEIDWIGDFREDDEGDMFFKDGFIYKARIKFMVDPSGKYDTDYIFKDNDYYIDGSRISATVNGVQAKVERSAPYFIDIEVSMPVGAGGKGSMRDLAQSSPTDYELNKDSYRASQKAYSIAEADAACPDVSPLDVITINNTYHAAFRAMREFGDEFIGHKNMLVTKVIVDTDDERIYGDVASDVNNTIQGPFNIREVWLSDKVDAVKFIRAIFAVMQGYTPEHSDIYCPEFSYLFHTQRATLFIPETAVADVRAMFSRPTWSFRTLFSLKTYSGDVHSAQGAGATAAKPFCTSHVFTDKVAAADKVFRYGTCSNWPEYYYSCKICGKCEHNDKHVFSMNRPTWEVRAHQYDQPVADDQAYVGVNSAGQHVWWYSCIWCGHSEGYDQRHITKAEWQASGTEGTYESYRDAMADMTKQFEESALLKTTAQPGMFILKKKSDSKMSPAFQSSVNFALNDNLLDESVLGNDYTLPLNHRQLNSLAEHLVKELTGSEATASSIGLDKALGGKAPADDSPVSRQEMAAVMYRALRYIEECGVYSYTEFVSGLDKYSDHIRIAPWAKEAMAFMEALGLMNASSGGTLFPEKTCSIEEAIDLTEKCTHAHQLGWYQARSWGEGDGRSYFGNVCYIPHQEMSTNHTYAPGERVWVTGPRLGGSSKSLPILEPYTGQILYVDAEWFRPVRKFVYTSKRTITGPIIFQDYFDGVSTKTFMNARTLLIPRTLLILSLVVLSGAPCASAQSFKERLKNAAKKIEQKVKQEVAPKKLPEKSGNTSSLDSELQKRHDAMVGPDNNKNAEDEAPTVRLPETHTALFAPLGYPVEATYGIKSVKPVMPPREASDQVNWSEKQPNVYELDNQSLVAEFLMLDDCFADGYIKTLTPAHWRYDEIVKGELWARVGALNKMVEQYNEAKEEYGADTYQWVINGIHNKIASVLDSREYKTLIRSSLTPLFTLKDKWISDETKAYFNAHGGYENAHKANWTVWDPQPNKKSITTSASGQTGKVIEEVGAGATVDIEGVLYVLHNSNNGGASHAFISEVAKTAVAGKNIVIPDYVTYNGKKYPVTEMRGNIFSGTAIKSVKLPSTLTEISNSAFRETPITEIVIPASVKIVQGSAFYGCKNLTKVVFENDVMDEVHGCFQKCINLKNVKFPRRVGLMSYDMFEGCVNLTEVMLPENLSEIYSSMFSGCKNLKNVDIPASVTKVGNSAFSDSGITSLDLSNVKEFEGFCFSGCKALKTVKLNSSLKENFLMETYQEFTECPLLEVKYINNEYVFPEGFIFVDGSRMYGLGFFANIVLLYFLLKSFNLLNINNMHNFLYINLFINLIPPTDFMANSDLKISDLDEHAVMGAVPGGIKCGRLPEATIREDLPTILEKFNLLHEGKLNNASAVLFGRDFYYYPQCLPRLACFKGTTILVMGEDYSHNRDYIGKYWNRKYIRAIQAVLNSTKGKIGKGTSFFRKAFGENIEEYHKLLEIPETMIIYRYFFEWLGLENGGKKMTIEILGNDSICNASTHSWWKAFCDCKKCITQRMGNDIEYYSQKRFMPVRGRDKVDEESRQSWFSHQSEEARPYYYSVYLADHDIKAEIAPTERAAIMRFTFPESDESGVVIDAFDRGSYIRVMHDKRTVAGYTTRNSGGVPDNFKNWFIVRFDRKIRDFQIYDGTKPVEGEQLVGEHALVRVGFETRRGEQVTVRAASSFISQMQAVQNLEELGKDDFETVKAKAQARWDEVLGRIEVEGGTTDQYRTFYSCLYRSTLFPRKFYEIDKNGNILHYSPYNGEVLPGYMYTDTGFWDTFRSLFPLLNLVYPSVNAEIQAGLANAYRESGFLPEWASPGHRGCMVGNNSASVVSDAILKGVTPEEDIATLYEAMLAGRRKVHPTVSSTGRWGYEYYNTLGYVPYDVNIPENAARTLEYAYDDWCIAQVAKMLGKDEDAKRLEKASQNYRNVFDPEMKLMRGRNADGTFQSPFSPYKWGDAYTEGNAWHYTWSVFHDVGGLIDLMGARKSFAQMFDSMFVVPPIYDDSYYGSASTKSPRCRWPTWATTPTETSLHSTMIYLYDYCGQPHKAQWWVREVMDRLYSAKPDGYCGDEDNGQTSAWYAFSALGFYPVCPASDEYAVGSPLFKHATIHLENGNDIVIEAPENSPENRYVGSMTFDGEELEKSCLKYSELKMGAKILFDMQAQKMVKLEIIFFKTGYARVPKVINITGLLKDWDVKSQSFRVGSAEATTKNKLLFDLRTKYLHVADTWEMEGRNWSPVQLSHCFDEIKAAKPEVKVKSVQQMIDYLEETFKNKKRIKNGQIVDSTTNAKRYVYLKRELQAFTKEKYEKAFSSYFFTDITEEFLLDFAFWLKERGIRNGNKAGLTHKLRLLRAVCRQAEKKEMYGVNMDNFLCLGDDINWPETTSRAVPETVIAKIANVDRTLFTKKEQLHLDLFLFSYYTGGMANVDVCNLTWDLVQEDRIVYERIKFPKTAKPELLSKAKAIMNKYRGQSYGNYVFPVFTHKHTTTSKKTTRVKQISTRLSQTLTKACKMLRIKENITWYSARGSFISKMVDAGNNPYVVAEMAGNSPLTIYKHYYKNTKREEIKRQMEEMFMITNVIFIILTESLLFLIIFTTFVVNNLNNIYMKELVSKIQEVYATFSTDAALQIEKGNNMKIFERITKRYALQNYYLRRNFYWPDTLPEILDYWQQHNDLPFLYGVDNWPYDVMCERQRRKGVYASQYLIPDRTARQMAALAVRYFDNDSRVVGAANLNLLLQQALNPSGPSLNRGGYTYRQGDRVMQQRNNYDKDVFNGDLGYIREVDTEERTLKVDFDGKWVEYDVTELDELTLAYATTIHKAQGSEYPIVVMPVLMTHFVMLQRNLIYTGITRAKKICVLIGATKALAYAVHNMSVLKSNTSLRERLNPSLTTDGKLRGMIDIPLSLRVPPQGRYNRGIYTCYECGFEPPHYNVVPCMLGLAETSAGTMVVWECPRCGQKWMFHYRAQNSREAHDYAAQLLAYRNGDPDWRMTLNPDWIAAQRQKSNPKTMNLNEYYRNHKDAINSSIMEIACDLAVGQLLNAHDAPFETFVEADDPDDPDSGTHYKEEFQKEYDKYYDEEYARVSKLMRFDYCQEDGVAASPEDTNTMKRYEFYRNQKITVIDCRYFSFEAENLETAVQKIKELCADGQLDELSNDPTYQEDVAYQIPGTEYPLDIENNNGDPTVMIYSAADGTCITDNLPISTGITQTKNIIINMKMQESDFRRALEIITRNNRITVSFNTPIADNYSQVYPLLIHESNASVLKQLHEAGFSMSMTKKGLEVSKYMRRKFKLKVSYTFNGCFTLRAASGKEAARLVSEQCGTVLSAIQTTLGEESEVDWHFDKHPRLAIREVIALPETLDGEKLPRVQVFHPGQRVFWRDPADETSGYYTVCSGNDDVEEPSDDDIIRICSSASEAEVFPCELRPVFKKRMAYESSIPFADIRDFREAEINGISALFTMCRLDSETLPADFHSCEVMGGRGSDFQWLVPLALANFTGTFVSRQPLLREGQAYAEIRRYGIYDATTVDEWSENNNDNSMNNLCFNRFTLRTDDAKTRRKILRWLALNYRLYEYLPSEAEIRGRFISRKPFPAEALRRQIGKLRGDRTLFLRIVSTDLYSLYVEGNVYLLGAWYRIFLMERNIIIENICTACRCGERRAEEYLAAELRNLRELRDAGALCYGDLETACSGLGLDFDYTDYFCQALSLNMRKWIDQSTFDELLLANAEDNIERAIRSASAVLETVQEFVPEAALFYRVTHAVDSLKNYFEEACTGFRRNDILFLVRQYFYPKPYYDLRFDWSFFRYADNYSYGKAFDKQTAPNRIGVFTKKKIDDWVEYLTQGFRNLERIDAENERKIIGYRNRLEALSDVVWVHDKSHGQIIRNGLTYTFDIRQTDYSEKISLDYRCRTLDDFLALSDNKFTPKPMKHQKFEIAVAGYDYRFKTYARDGVEASVKVKCFLGKPDAECTILVPALNDYLRETESCRRQVAQRMPDKYYLVESGALEKLLRTHFMLTQSTLLFEHLLSHSDRPMFLSARKVCEVLGLDRHQLEQCRKKRMIRARTVNGQMLYDAYELLALTELFYRRKLRKTLSRIPQFEVRMYLHTCINSSFGHCIFAAKTYCNPIMERLDEILEIVREIREDIAYMKRHRNMLCGTPILEVSEVCDLLKISDRQLRRYCVSGQLTGFHFGRRLMFSAAEINRFVERIDTECRQRKELKNRIRNLMRSTFKVLFYLKRNKDKDQKVVPVMGRITVNGSIAQFSAKLSVPETLWEVSGGRAKGRSLEADRINRHLDNIRTQIGKHYQDICDRESYVTAEKVKNAYLGFGEKYRLLLEAFEKFTGDLKKRVGIDRCHGTWNRYYKSIDHLRTFMRKEYNVSDMPLAELEQSFIEQYHVYLKSDLGLKPTTVSGYLKCLKYVVKIAFNNGWMPRNPFSLYQYTAPNPERSFLTEDELRRMMTTELRYKRQDYNRDMFLFSCFTGICYADMASLTYDRIEQDAQGEWWISGNRQKTETRYVVKLLPYALFILNKYRGLTGDGRVFAMSTLDSIDDSLKNIARECGIDKQLSFHLARHTYATTICLSNGVSLETLSKMLGHKNITTTQIYAKVTPPMIDREVTMLREKLATKFSVMYIPLYDYYKKVPVSFIFLSAGVDGKMDNEIAPSDTLYLNNWWAKLDVYNYEEAILLQDFCERWDETSNVFGEVESLDYYPPYPDIPRFRMTDYLWGKKDWIVQLGPLTGLYMTILSLVVILSLSSLVLWRYLSGKYVETAESIRDYFMWPTYQRLPLEYYNSFGYYPRSMDEAVDFYQQTYWPNMAKKDLRAMFVMRYLTVDGYFDGTGIRDAANGGYLEHDEVGISPDLSKRIDVWLEQYWKEFIKGFPDRDKVVELDEEGIRIARRLKKEFPEDKIGYFSDARMVALYDEKVHGGFRSGNDCRSKGKSEDGMKTEKKRKLVPSFPNRILFKTMSKIVSSEKSYGLARRDCRIVSYLSKIAKAEKKTGACSQFSRRILPSTKLGNKLKNSPGAIGMDNGRIYKVLIIEPSAIVGAGIRTLLDGFSEFRALDAETTGDPATCFERVATTGPDLVLINPALFPVMRRTPIRNAFPMLQDVPIIALCHGAVDDELLHEFDGVINLYDSPGRVHHKLRQALEQTRTTAQPEGYELSEREREILVAVARGLTNREIADQYFISIHTVISHRKNITRKTGIKTIAGLTVYALLNNMISEADLGNMKQTEHSFDNTERGRLLFSPGMKLADLVESNYELLVVLARMGIPLGFGESSVGEVCRQRGISAELFLMICRIYSSEVPVLPYEQLTSDDLGGVLDYLHTSHLYYLEVTLPHLDAKMAAMTATCDGVHSKILSTFFADYRREVDNHFDYEERTVFPYVQALLEKRRVDGYNILCFEDNHSDIDGKLCDLKNIIIKYLPENCSAKLRYEVLSDIFRFEEDLSRHTVIENQILIPLVEKLEKNGMKRLFGILLWALFCLFGTQLSFGQNNREQVLALQRQAIELMDNGDPDQGIVLLRQALTLDPDYWPLTYEMAYAYMVKRDYQKAIKLAKTLYKYEDCNDLVYQLVGNCYDYLKNPKKALKVYAQGLKRFPDSGALYLEQGVVSGMQGHYDEAVASFEKGISVAPMFPSNYYRAAQFYAYSTSKVWSQIYGEIMMNLLPSGDRNKEMSELLFRNYKTGIVFSTDSVSVDFYENRPIAITIDMLLAGDVREPYGAVYEAAMQAAAGGERSVDLESLNRIRSRWIDEGLKKLDEGANTVLKYDNQIVVPFLEYLRSVRDAGHLEAYNYWVLREGNKTAFGLWVNDNRQKFNDFMKWFEHNRLKIADAPIPISYLMKKEWNDVREFHEKFGHPCPDAPRMLDKKRSLSRAKWMNEEVAEFLVAEDIYEQADAMIDLMYFALGTMVEMGLEPDELFEIVQQANMAKLWPDGKPHYNPKDGKVIKPDTWEDPAPKIRACIDAVIARKGKMPAFSIVQTSTENHEHLFLYLFTKREYDPNSLGQPTVKRTKQKISVNSALKKKSASATTFGLPSALHFSGKIGYGSAMQINKAQFVCSSERLSQLPKDSLPEFAFIGRSNVGKSSLVNMLTGRSGLAKVSGTPGKTRLINHFRINDSWYLVDLPGYGYARTSKTQRDEFAKIITDYVLRCERMHFLFVLVDSRLEPQKIDLRFIEMLGREGIPFGIVFTKTDKLSAAQLARSVERYKQVLGEQWEGLPPMFRSSSEKRTGREEILDFIGKCLTECMAIHKIKFFAGRGSRYLAEKIVASYGTTLGNSEVQQFSDGEFQPCFNESIRGCTVFIIQSTFPPLDNLMELLMMIDAARRASAYKVIAVMPYFGWARQDRKDRPRVPIGAKLVANMLVAAGVDRIMTMDLHADQIQGFFDVPVDALYASGIFVPYIKSLNIEDLSIAAPDMGGAKRANTYAKHLSAPIIISHKERAKANVVGKMTAIGDVKGRNVIIVDDMIDTAGTICMAADMLMEKGAKSVRAAITHPILSGQAYEKINASALQEVIVTDTIPLNPEKDLSKFKVMTVADIFANVIERVHNYKEISSIFFKMKGLKGKTVVVTGASSGIGEALARECAVQGANVVLGARSLQKLQLIVGDIRSKGGEATYCAVDVTKPEECRNLIDTAVGEYGGLDVLICNAGLSMRALFDDVDLEVLHRLMDVNFWGTVYCTKYALPYLQASHGSLVGISSVAGLHGLPGRTGYSASKYAMTGFLETVRIENLKKGLHVMVACPGFTASNVRFSALTADGSSQGETPRDEAKMMTPEQVARIVIRGIEKRKRLCLMEAEGRATHFIKKFAPGFLDRMFYMVMAREPDSPLKMGMKLTILGSGTSQGVPVIGCRCAVCTSKDPRDNRLRTSAMLEWDDIRLVIDAGPDFRYQMLRTGVRHIDAILLTHEHKDHIGGLDDVRAFNFVDYPTIHRIDVFGTRQTLKCVRKDFDYAFSVDKYRGVPEIELCEIDPAVPFCVKDKEVIPVSGHHSPRFEVTGFRFGELAYLTDFKTIAPAEERKLYGVEVLVVNALRPQPHDSHFSLDEALALIRRVAPRRAYLTHMSHEMGLYAERSALLPEGVYLAYDGLEINVNDMFFGVKNPGVREWFFRFDPNLKNNYTKLSGLKDVSFSNCINRIAKRTSDFLDASERNVMNVVCAPGTAAIVSSCRPAFCLRWRKLFRGACSGCLAVAFSGGARGRPVPGDYRICRRRGIGLWRYGFRIFPTDTELFGCAPPEFPGVSWIVFAARFEMLENLTYFLNGASLSFFAMGAFHMAIYARQSKSRPHYLFTICLIWMALIELKEFFLSHDAAYNYEILGPGFTFPDLFTLALLSLFFFELVMPGRITARYSLKLLSPFVLLGGAYWLGTAFEPRTVYASLPELLKDLPSFLPTVLLLYTLYTVGYCLLALTRIVLYSIRYSREIAQAYSFTERIHLQWLRWMSALLAFYLLSYIIIILFFSNIWFTILIYILTLTVWGILYGCILQYRIPDIIRDYWQPLPEGEPIEENPEINLAEGKGRAASLREQLQEAIVQRKLYLNPGLTIIDLACECGTNRTQLSLLLNKELGLSFRDYINHCRIQYAALPLLEDEEAGHKIEEVALLSGFGSTATFYRAFAKEKGMAPQQWQESIRKSRTRGGEDNGLREITGLQEEYPMCRGNESAIRKAPGPRTKAYAPYTPAVNSAAGTGSDAKEEHRFDPAGNGHASPMWAKQKTEKILIQSRMFKNQPKGLIPAALSNMGERFGYYIMNAVLVLFLCSKFGLSEETSALVYSFFYAGIYVLSLVGGIIADRTQNYKGTIISGLIVMTIGYVVLAFPIFATPENQTWLLTLTCGALFLIAFGNGLFKGNLQAIVGQLYDNPRYASQRDAGFQIFYVFINLGGVVAPFVAPLLRSWWLSENGLMYNAELPALCHGFLAGAEVNLTNLYELITKVGGSVVAGDAGSVSAFCSNYLNVFNTGIHYSFIASVAAMLISLSIFLFTKRQLPSPAKKAKEETVTYSAEEKAAMATEIKQRMAALFAVLGIAIFFWFSFHQNGTSLSLFARDFVKTDSVQPEIWQALNPFYVIILTPVVMWVFAALARRGKAISTPRKIAIGMGLAGLAFLFMTVFSIINGYPSAEAFKDLPAAEAAALKTGPWVLFVLYFFLTVAELFISPLGLSFVSKVAPKHLQGLCQGLWLCATAVGNLLLWIGPLIYNAYPIWVAWTVFFSVCIISMGVMLGMVKWLERVTEMRLTERRKMEVNENRGRLCRKKLQGKIRKKKNHQKEKDITGSVKRANHNKGSMIVSDPTELVQPGGNNHSSRFVRLCVGACFIHGAGMTATANFRQMAQHIGLAICGLMMRTAFGVFGILWGIIREIVNGVFRVAIGVIVAILSTIAFFGFILWLFTLMAKRNSKTAAQQCRYYEVDNIFVYMVETYINGNFETFRRLYHELNKDARRDFMDFLLSEVEPTYWREILKQIIMKGTDHFKRTIYMYLEQRAEEDALFAKKYRNPAKNMDECVTHILNYVQKSGCNGFTDGEIFGQAIHYYEENEIEVGKPMDCQVVVNHVVKLTAEEKAEARQNAVRKYQEEELRKLQNRHRPSARKENQPQPSLFDLGLMKPKTKIQKEVARLSANLRPISATQIDWAYRHCVEHIGYRTKKGNITCSDCGHEWHSDSGLCDTLEGCTCPKCHAELKVQDTRRRIYKETQNFSVITTCKGYQVIRVAQVRCESRKGEPMRFYCHEVVQRWISPDGKVTDMALLRGFLFCYCDVWALGSDMEVRPHNSLYDDVVARSCAYPKMRILPQLRRNGFKGDFHGISPVRLFKALLSDPRIETLMKGGEIEVMKHFLFNTRTADECWASYLIAKRHKYQIDNLSMWCDYLRMLKKLGQDLRNPKNICPEDFMAAHDNATRKIEAIHEKERAAEQRRWEIERREREQQRQLQRKKDAEDFIANKSKFFGLVITDEEIIVKVLESIDEYYNEGKTQGICVFGSGYYKKADTLILSARIGDEIIETVEVDLRTLEVVQCHGKHNQDTEYHERIIDLVNKNANLIRERMKAAMEVRIESMICVWDDAIPTMFLEFVNLLTLTTSEGELRKSVKEFAEKHELDKFFLYGFGSHHFYLHQRYTSNPEMVMKNRVLSVHFMTTRMTINGVSTCAEAGTEKYERFQSGIGRRRRTLVQYDYRHPIDRELFSCVKPTLDECRAARDKWLNAKKGKEDRLMNTTYQTLIVKFSEPITALDGIFDDTGAWGTDTLKGWIDDYESTRFTATDSHTAVITSEYNMECVKEWLQRQTPISEMREFMIAKTILQQIGGKRFTAMTGSRDFIDMGNGLRMSLARNKTSANRLDIIYDEGADLYNMRFYRRTFSKKTFECKTKDIAVHEGIYFDMLEEMFTMVTGLYTRFMKKVFRKIQKGTTKMIERIKSLGEMETKQKCVVQRFEIIIPLHQKITTQYIASASFTCGFFSYRRLDKGFFATFFVRHHAHMTMLCSLLTVCSVSAQISRQEGTDGQAAIYRLPLMERAFLCCRYFEGWHSEKHYPYVGWGHKLLPNEKYSARTMTKRDADELLRKDLRKFVAMFRKFGVDSILLGTLAYNVGPAKLLGSKTIPKSTLIKKLEAGDRNIYREYIAFCNYKGKRHAMLLKRRKAEFALLYIPMNILNNRNKRTSIFKAVALCLIAAMSFTLVSCDDDMDIQQSYPFTVEVMPVPNKVVKGQTVEIRCELKKEGDFSGTLYTIRYFQFEGEGSLKMDNGITFLPNDRYLLENEKFRLYYTAAGDEAHNFIVVVEDNFSNSYELEFDFNNRNVKDDDLTIVPIGNFSPLLKDMQVRFGGRYGKTYCRKAVRRSVPSLRLGKGGDIFTLAGEFLQSDDFMKQAKFIAEAANMTVAGWEKPVYLSKPTESVFEDVEVAPLLRSLLTEYLEERGIPYAIASRHCCRLNYGVRGKRYFAVGFPNMAGGYEVRSRYFKGCIPPKSVSLVKANDIPADECLVFEGFMDFLSAVTLGVTGNADCLVLNSVANVEKAAGLLDGYGRIGCFLDRDEAGRRTLAALTMRYGERVTDRSSLYDGCKDLNEYLQLTTKKQKNNHLKIEEQMAQDTYIDEMTIYNPSGKAIYDAPVTTSAIIKYALMGDYYIELPFSLLTPLDFPLGSYITYKGRKFEIMSEVYPDFDNKTGGYKYTLQFQAQQNHMKNFICFWLGGDNPEAVFHNTTDLASFGALIVANMNKALGGNNWQMGSVNVEHPETNKLVSFNGDTCWDALSSIAETFDVEWWTEENGSIVTLHFGKLNFGTPETFKRGEVVKSIPAKKGDDSEYGTRFYVFGSTRNLTKEYGQSEQGGVTNHVSEVRLRLPDGQQYIDARPGLTKNEIKEVVVFFDDIYPKNTETVTSVETIDRTIIEGQTDKAYVMVCNDTPFLPSDVIEGETLGAHFTSGDLIGWDFELALIDDNGDNIDPATWKPEDGFNKKFEIIAQVETSGESQQIIPNENMRPRGKDDDRGPDTFVLTGVKLPQQRIDEAEQELLEVGTSYAAKHSSDTTVYDCETNPVYCTHNEKNYEAGQAVRLMGPQFGIDGRLSRIQGYEKKLYNEYIATYTIGDNTPYSRLGSIESDVKASLYSQRIGIAENGAAIYLITRYDNTFPTDTNAYSARRAIWEFANKQAPDTFKGRMTFNAGAQFGPSYASGITGVGGFISEKGAGELESLFIRRFLEVPELRKNRVGISVGDDWSAPGAGVIESVDKDQKLVTLKLEEGEIGAVAVEDICMGIFHDFDPSNNATADSDDGRGNFSFAGFATVYFRITEVLGARNEQFRYELRPLSATFTKQIDPMESMTFVAYGSFTNPARQSSRYSTRTYQRYLRNVSDWEFTAENIAAQFGDLTNLSVFGIQMSGYSAYLDNIYLQGMISSLDKKALLDTRSKLFRMVGDDGVGVAFTPEAGWKQGKLYDPATGQFQKEFDIEMKKFHSALFDFCWFPNYDASIEYLANNIADPEPWDFSDATQAKYSILKSYIEHTFRKIKSENKISFSSDNNFACFNTGLVTANLESIFALAERNNRPDVAEKGLSPYVFKAFVRESDIQLISKFGDNIPDIADFFQKPEDLIFNPQCRVVPQIDHIIADNMDRFPAHMQGLSSDEMRRRLVGAINEAQKKARSNYKIAVPLYYEGKIQLLLPLCLTPGSPNPDLALATHKIGNNTYTARTCLTLKMAYNNARLIVKPQSSWLKPMAKNLHLEKTCIIFASLMKYRRTGLSVTTNIEHKGYNKTVIILHGGLFIYMIGDLLINGSDAYAKGIAMGDDFLGNILSPSSLKSFVENDDPTKNGKEVIYPQTPKLASRDLTLTFTIFGNTTTEHLTNYKNFIALLQKGEISLSIPALGTEVYHLTYVGDSGSYMIEADRLASRLTVKFNEPNPADRAAREMKIEKDIADLDAFIKGIEPEVVGFLDEQARQAVALQQAKSDYQNHTWNLRSAVGYVVTYNGKEKKRFIGDQNHPDPRAAEATNKLLNEENKAGTGIIFGDGMFYASFVSSKGYDVIDTAELYLAKALNDKKMKKFLLLFTIAIFVCSCGVTKYSQTTYFADFRDYTKDGFTITPSSSGFTYKSIGDISIDFKIGKKDGYNNPDAEFGMEHIFVPTYDYITAEMVKKAKSLGANALLNYKVIPIYSASKYGSSIIGYSASGFAVNLINVKMRRLLLIILFAVGISYAASAQHYKGDISISYGVGVGQFGTDNYGFQTTHGYLFNKNLFVGAGIGFLKFKDIDSGVIPIYVNVKGLLNADAGISPYLSMDLGYGAREGGGIYYAPGIGVNFRIIRNMGISVSIHYQSTKIYNENIGSIALKIGFNFMKKFLLLFVAVATLVFVGCSKDDEKGSAELVGTEWECVENGAYDLITFTSESEFSWYGYEDDFEDRFEMSGEGNYIYIPPKITMVQDGVTTVGYITGDTMPLGEKIYVKKKMVRCCKSTKFPPPQNFASEFLFNVPIKGYFVQEFLAVMGYFYTCLIGVIYARTLCETEMLAKVPLDFRQQVVRAFLLFYVYNQMLFINEPNLYRCIFQSRKKEAELFQNWVVEEVLPSIRKLGGYMVVKENDSPEIIMARALQIANETIERSKQRVQILEGENSHLQEQNRILAPKAQYTDEVLQSTSTYTLTQIAHDLGLRSVHALTRILMEKKMLYRQSGQWQPTAKVADKGYFDTRTAKLVKSDNTIGTSMTTVITESGRQFLHSLIGKEVSLMRFFSDRQHPFKLFISRLALLFCEANPLIKKGIVTFLQAHICLTACYICLLGFFYCRFSRPEAILKIGNRCISYMIYELSSDGYRLGLFPSEAEAIHHAAYLPKGCYKIREWAIDGEFMIFDTAVNSEREINNMNRIYVNKKSEITMIGKAFETAGFRCLRIILACDCHQPGSGNRRNGMIVLDGDKLLVEIVRCRGCAKNQMSALSFKINAETDKLNSFITSLERLKQVLATIPSGTKEFDVVNKKIAEMEARVEQSIKRITQMQNEAAKTVSQTEPQSLSTPSSTASTAGAQAANAEAEAWRGLLDELHAVSLAKRENIEQIEQLKAANRGLKAQYDALNKAEQNGFALTDKQIARRTSLSLTYEENKQAISRMRQEVANQIKLEQVAHGSIDEMSQALARMRTVYRSLNEGERGNTFGQNLLKNIQALDTKIKELDASMGVHARNVGNYASGWNGLSFSIQQVARELPALAISPQTFFLAISNNLPILADQLALTRQRVKELKAEGQSFTPVWKQVIKSIISWQTLLVAGITVLTLYGKEITEWVGSLFKGKQAFDAAKQAAEQFHATMTEGAISAQAEITKLDLLYRAATNVAKPYNERKKAVERLQEIYPAYFGNMSEEQVMVGNAISAYNNLRDAIIEAAQARAAQEVITEKSKDIKYIEFTGDAYKNYANALKEYNKAYEEYLERNKTIGTSTGHERIVSARAYAQSTSGIRKYRKEFVSELEKLGDEGKRIWDQIEDKFDGDVNAFIESINKGSEALTPAVEKLLTSSTVEEKNAEAEAARRKAEQDAQKAASQQEKNSNDLGKALQKLRDDALQAEIDLMKDGTEKRVAQIELDYQRRAEAINEAEQRIIELQGKLTQKQEEQFAILRQENDNRRKNERHEAIAGPPIDTNFAEYWKKEQADWDEYYMKYGTFREKMQATKDYYDRKMAEATTEGARAAIQAERDAALAVFEVQASDWAKEIVNLSVKNLEELLSEAEAQLAAAEAAYDALASSGTQEAAGYIDTINKLKARIAVLKSLLEKTKKEVSDSNWAEGARLLNELSATAREAANALSEFDEGLGKAATFIATMASAAGNLIATIDGVTDAASAAGTAMSALEKASLVLTAISAGFQLIQGAFSLFGGGESSWERNIRLAHEFNEELRLMNERVKINAEEFSNIFGKDEYGAFIQNIEVARKALKDYEESLEEIKKRGEEKNGFPGEGTISYTGLSQLYKYEKEWESAAESIANMQVQTRHSTWFRSAKYASLGDLIPELFDENGSLNMEALKKFAEEGGATFQHLSGENQEMIQNLVANWDTYQEALEASNNYLSDLFNNLGNTLADALVDAWESGADAADAFGEAAGDMLKQLAKDIIYTATIAPAIEKAKEQIKSINENESLSDEERFGAITETINTILDDVIAQQAIGEELWETLKKLAAEKGLDWEESVSTQSATSRGFQAMSQDTGSELNGRFTDIQGKVTDIRGYVMTETQSIIGLISSITSIQIAAVRNVQINNELLQYAVKTYLEVAEINTTTQAMNDTLTYIREDITAIKRNTANIMSKSANIVAASLLNKHHVIVRIGRLNFRFYQPYIKDLARAFADERLDLSIDGRQRYSLKTMSKLLFHCRWQQRLFLWYAGRYSDYRQIRIAAQKIADITTGKDLLESVKIDKTRKKTITETIGNNSIAGIMATMMKHLNISYRDAFEKVNYPTMMLMMIDKVRSLVGDEKKIVKGSGKEMAARRRQKNKMDFISFRIAGKSYSIYGMSPLTAIRIMQARDIKKELDKSIGCLKAMTQSVALGISDSKNIFNILKRIVLRRKFLKKASLDELFDAYNKTLKMIPLEDMAGISAVMEQLSQSIAKDHEMATITAVGIKNIWYADPAKVTGDLTGTLLGTILKDPTTKKVPNVHQDTWSLDEAEPSTTQYKNQLTDGIYRQSKEMGEVTMNFAIGQYDYETKAAFMGGTGTETTWKRARGVTNIEKCMVALTEDDQYCVFPKASIVARNAETDDAVAISVVATALEPDNTDVSSEYWFDASEVTDAASIMSVSSKMITTNDAQDILIRDCTDFGIKTFPTWDVPEGRIKNERIVVVTPSEQSPATYWESCYISVNLCIPDIKGIANRNRLKELERAAKSKFKSWTYGQYDNTAYHYRYENIGCEEDKDLGCHYVYVRVLFRVLNVKKDMIRFPYILQRWNHNTDEWQTVSRCNARYDGKARFIESPNGKVIEYTYEVVMPQNVLPLEENEEVRILDRCGKNIFDHRLGAPIGSTLEDSVSYPVQGFYKSGQRYEYTKIWLMKNSEVISARLYPYDVDDNLVAVACMDAGLSADGEYSSANKVSVAKAAIDILKQLIVLASEGNGGYSIGYNVEELRRRIHALAKDNGLTDIADEFNLQPTVKFLMADMRKPLFDLLQVDMQAELNSYMPGSGLAWPTLFPLRYTPTLDIKSLEGNDGIPVSADVIAFNAKAPQKTRKTIGTWSGQVAKVAISRQKDEKQIKEYQILRSYAQSSGNPNVALQLVDMVYEDVQFCYEGVNYLAEDLDLQVGSKSAIVLKTENNNDVVTQNALNFNIPSAHKTGVKNKWSASSDSDPLGDIIAGQKAIQKEGFSRPMYAIMEQAAFDKLLMSEKTVKRVSPVVLTATGLASSDTLTIDLVNTYMRSKGYPQIIVIDSYVKREARDGSQTTYKPWAENVAVLSPTPQLGWTWWSDVPQVSDTDALQAYRENVKITRYSELNPMLEVTLAEAYIMPALINRQSLYYINTENTSWNEGNAMSWQNKFYDAPEPDKVVFEVVFSEKEGGGTVDVTELDGDLPAGSVVGLATGNIYKPIKGATLVKAIGAEDTNIEIAKGSGFKQGEFIAFGGKAVAITAINSSDASKDVLTTAAFGTTVAIGAKGYQAKSAKASGAEAIYTPAYLTGNKLEGGTVNNFVRLVNGASVRAVTTNIAPEILANLKSINLVMKEKLLALLKTKFVGVDSAILDRIATNKAEAMTDEAQLPAIVEGIGFQDVLQSYGDYRAGDATQTAVRNYEKKHNLKDGKSVIPAPGGGEQQLEPGNKNNSQTFDPEAFEERIKSFIQNTMKPYTEKIEGFEAAQTQAQRAATIREKAHALGLDDDTLSIIKIDDNDDVDQVLSKAAKMFVKSGIGVTPPLFGGGESGDKMSAAMAARLDRKKAAEDYKTSAIKGLNMKVISFCNWWAATSQPLRQKSVCSAHYANYFKEKFDKKRRIILADNMTTIKQITQALSNQFNTVLGRKQKFVELIQNGDISRLLSKMTTCNDKITKALAEYDPTKHEVTKRPNRHRKGKPDIITAKLPIPFQKVINLQATAFLFGSPIQFSDISDVIETSINGELNRKSKAEDAYSRFLQILKDTRFDSNIRECKMKAGSETLCAKLYHLYLSTNGEIQVMVKILAKSLGDDIYYKFDDFGRLMLFIRQFTIQDDEGNDEIHCDIYTDETIFRCTQKAIGWEVLPEKNFIGKIPVLLYRQEPEWADVQKLIERREDIQCRDADMNDYFANPKVVGEGIVDGSLNPDDPAQIIQTQNNGKVYYLTYDSAPENRKRECDTLDSFIYGMTCSVNPASDVIKEMKIPSGVSWEYMFFFPMLKAKNYQDYYGAMIDREINVVKAVIGVLYPELKLNGQLEALKIGYQFSTPMPDNVSDTLDIIQKSINTGTMSQETAIYQNPRIKDPKIEIERLKSEKGHRIMFRRGIFDFITLSERGHHVKQEEALCILTDKTHTEFLYGGAAGGAKSWTGCTWLVFMSLCYPGTKWFIGREELKRLRESTLITFFKVCTQYGIKRDKDFKYNGQDHYIQFANNSRIDLLDLRYLPSDPLYERYGSVEYTGGWIEEGGEVNFGAYDTLKTRIGRHLNDKYGILRKLFISCNPKKNWMHSTFYKPAKAGTLPGHQIYLAALVQDNPFIEKDYIEALKSTTDKVKKERLLKGNWDYDDNPNALCSYDNIREIFYPKIHTRTGIKYITADIARFGSDRARILVWDGWAIIEQVSFDRSATTEIAACIESLAAKHRIPRYRIIADEDGVGGGVVDMCRISGFVNNSQCLNGENFSNLQTQCGYKLANKINSFAISFDCELSDGQKDEITEELEQLQTWNVDNDRKLFLKPKDEIKQDIGRSPDWRDALLMRVWFDYKQIIPLSKEDLGLMANAKKLTIKQEKFCNKYLEYGNASEAYRFAYDCSRMTDKSIWEKASSLLADVKVAARVKELQTQLSKKELITKEEIVRLNLSIINADILDFVNADMVEENTEFGIRQVSSITFQDLKSLPPEKRRLIQSIKIDRSGCPVVELMDKSKAIETINRMLGYNAPDKTEHTGKDGNSIEINTTMDYSGLSNADLLAAHALIHKATNGKSDKMLLKSEKRDEALQSKMPRIQKATFWKTGTSPNVEVAGAYKYMLLRSAYSYLCHVLAGLFYILFCWALGNGVSLLIGGYLPGSIVGMILLFASLCLHIVDAEMIRPAARFLLGAMALFFIPYGVGLMVSYEVLLDNFWAIVISGGVSTMLVLVCVGRVFQKLNKKAMEQFVGSDLVLLTLTVGFYCLGSALYSRTKFALLHPVLLGFVAMILYLKLFGIGYEHYRRSTELLNFGLGLSVVALGYLMYEQLEHMRGRLLPILVSVVVGCVVGVLSVVYLARMLGADRILQTSLAPKSVTVPIAVSVAEPLGGIITITSVVVFCVGIFGSLVGPWLLRRCGVTDPMAQGFALGSAAHGIGTARAIEIGALEGALSGLAMALMGIMTALLLPVIEKFLYMDWLYSLFVGGGIAHTVFTLALVITAGILLGKVKVCGISLGITWILFVGIIAAHFGMGIPAEVRHFIQEFGLILFVFSIGMQVGPGFFASFKHGGLTLVCLASTIVLLGVGVAYVIHLVSGTPIPTMVGILSGAVTNTPGLGAAQQAYADASGVEDPSIALGYAVAYPLGVIGIIFSMIFIRYALRVKFGKEDEALAAISAEHKMAEIVSIECTNKMLSGHDISYVNELINRKFVISRIAHPDGTIVLADSNSIISLGDKVLVVCASEDCEAVTAFIGNRIEMGEKEWDTPDSKLVSRRILITKPEINGKTFADLRLRTRYGINITRVNRAGVDLIPYQGMQLQIGDRVMVVGPENAIEKVAAVLGNSLKKLREPNLVTIFVGIALGVLLGSIPLLNVPQPVKLGLAGGPLIVALLLGRFGPRFHLVTYTTMSANLMLREVGIALFLAAVGLGAGDGFIDAIVGGGYRWIGYGALITVIPLLLVGIFARARLKMNYYTLMGLMAGSMTDPPALAYANGTAGNDMPALSYSTVYPVVMFLRVLTAQIFILFALMLRELSQILQKGCNPASENRASFLMGGLISIFSALFSAFCYLMRLSDLKTGESATILKVLGHGGFRRRIMEMGFVRGKKVEVVLNAPLHDPIVYRIMDYEVSLRRSEAQMVVVITNEEAEGLISGEYNGTREGDQLHEVIAQSSKRINVALVGNPNSGKTSLFNAISGSHEHVGNYSGVTVDAKRGHYNYKGYRFEITDLPGTYALTAYSPEELYVRRHLAEHTPDVIINAVVASNLERNLYLTTELIDLNPRMVVALNMYDELEASGAKLDYDSLGRMMGVPMVPVVARHGRGIEALLDTVIAVYENEDDRVRHIHINQGPVIEESLRTIAGALKESGELPPQFPPRYIAMKLLEEDSYIKDRLKHHPNYPAWEETSKREAQRITNLLDEDVETAFADQKYGFISGALRETYTPGKKEQTQVTKIIDAFVTHKLWGFPIFFFLMWLMFYCTFNLGAYPQEWIEQLVGLIGQGVDAWMPDGALKDLLVDGVIGGVGSVIVFLPNIMILYLFIAFMEDSGYLARAAFIMDRIMHRIGLHGKSFIPLIMGFGCNVPAIMATRTIESRSSRLITVLLVPFMSCSARIPIYILLIGTFFAAYASWVMLGLYLLGIVVAVITARLMRRYLFKKDETPFVMELPPYRVPTMRATLSHMWDRCAQYLRKMGGLILVASVAVWFLSYYPTPDAAAPAETTEEHYENSYLGQVGQACSPVFEPLGLNWKASIAILTGLPAKEIVVSTLGVLYSEQGDAPEAELDSPALSQRLVASGDFTPASALAFLVFILLYLPCIATIVAIAAEIGWRWACISVLYNTALAWIMAYLTYHLFSWLMKNLVEKINAEYEVFVSNANAQVEKGNKAAGTRARKAALELSKLMKEFRKVSVEASKMAVHEKKESFKEHNDRGSILLAFYFVLTLLIPNLVLLYTEPYSIWSAEASLFIPMGFYLMWSAVLKRSGIMIWLAFPLVVLAAFQIVLLYLFGNSIIATDMFTNLLTTNPEEAGELLSNIYPSIIIVCAIYLPLLWFASRDIGQRHCLSKTARKNIALIGLSSFILGGLFLAPAYKVSEDKRVLKTDIFPVNVFYNIGLCGSEFRKMYRFEHTSEDFTYHARRTAEASKREIYVYVIGEASRAANWQLYGYHRETNPCLTRTEGLVVFRNTVTQSNTTHKSVPLILSSVKTDQHEELYRRKGLPALFKETGFKTWFLSNQRPQGAMIDKLAKDADSLVYLPEPRYDMQLLEAMKRVIAEDPEHDLLIILHCYGSHFTYHQRYPREFARFLPDDNVAINRKNVEKLVNAYDNSIYYTDHFLSQTIEYLRSLENDCSALLYCADHGEDILDDERERFLHASPTTTFYQLYVANLGWFSPEYRREFPEKVEAARNNESAPATTHSMFQSMADIASIEGDFIDPAYSLVSPTFDYRAPRRYLNDHNLAVPFPKTGLSDEDLENFRRHGIDLSYMSKFLTVFCGLLLFASPLYAQDNKVYIGENDTIRYSYTPLQTDSIPASQPSDTLAAAPKKKSFWRRLIDYFGESSTDKTFEKKIDFTFIGGPSYSKDTQFSLAVMAAGLYRLDRTDSLTPPSDITAFITGGTTGFYMVGINGNNIFSHNRHRISYKLSFYSQPTDYWGIGYSAGANNPKGSYVEKRYDVDVRYLYQVVPNMFIGASVNFRNSRGIKFTRPEYIEGQNPENTTTGIGAIVEYDTRDFIPNPYKGLYLSLKGTWRPDFLGSNAKSLWQAIFTANSYHRVWKGGIVATELYGEFNASGTPWLMKARLGGSKRMRGYYEGQYNDNDMITLQVELRQNIWRRIGCVVWGGAGNVFPSFEKFKWGYTLPNYGIGLRWEFKKRINIRVDYGFGKHTSGFLFNINEAFMKLKLWLLLLPLLGMSVAVSAQSSLPRKVSDVTLLDLNGDPTQLPYWGEKNLMIFYIDPDHHKQNEDFTTDMEENHRVEGENLFGFGVMNLKDAPMIPNGMARNMARKRTASNGATVLADQNNTLRDAWQLGDCNNMFVLLLVSKEGDLVFMRKGPLSDADKKEFYQVVQKYRMNYGIYNPNYGFPDSLSFGMKRLFAARPHPCYGSYLSLDPQTSKTRDIRLAVPLGIFLLKNTEKSSDQAELPALNTQNDFLEYELLVFFQSELVIHMENKLQTWFKSHEGADWAILYLRLFIGTIILLHNVGKMQAYNEIINYYPSWGIFGSAFIFVAIATIEVLCAISLMLGYKVRLSAAIMAASLLISLLFLFPGKGFGTSELLFVYLGIQVALVISGGGVYSLDALASAKRAKSQRTRNSSRRIEDSTKKMNILERMRAGELIFDTDPEYPSLYAEFEKTMKLVAQLNSGYHTPEEIRDLLGRIWGQPLDESVRMFPPFYTNFGKFTRVGRGVFINFGCTFLDRGGITLEDGVFIGPGVLLVTENHPEQPAVRRNVYAKPIVVGHGVWIGAGAVILPGVTIGEHAVVGAGAIVTKDVPAGVIVAGNPARIVRSIKTEMKIGIIAAALAFVGLSAVAQTNQKTNMDMKKLELVQEWDKTFPKSDKVEHSKVVFVNRFGVTLAADMYVPKEVVGKLSAVAVSGPFGAVKEQSSGLYAQALAERGFLTIAFDPSFTGESGGVPRNVASPDINTEDFSAAVDFLANEDRVDPERIGILGICGWGGFAINAAANDTRIKVTVASTMYDISRCTANGYFDQADNADARYEMRRRLNAQRTEDYRNGSYVRAGGVVDPVPADAPQFVRDYHAYYKTSRGYHARSLNSTQGWNATSNLAFLNAPILAYAAEIRSAVMVVHGEKAHSRYMGEDAFKKLQGDNKRLLIVPGANHTDLYDKMEIIPFDEIAAFYREYLKMSDKYKILFVCLGNICRSPAAEGIFRQMVEKRGLGEKLEADSAGTYAGHTGEQPDSRMRNAAYARGYLLTHRARQVRLRDFEEFDRIVAMDDTNYHNLYRLAPSREAGNRIYRMSEFFREHPKWTHVPDPYYEGHEGFELVLDMLEDGCRTLLDELEKRMKKIFILAIILLSGTAAASAQEFLTINPDVRTAGMANASVATTGGAYSVFQNAASSLFSHNLFEVGFSYSPWMRDVKKGYDLMAFGGFYSFNHKHSISFGTRFYREPKLSPDDEDYPFIPKDENNNPIVGIEAFRPLSVSADLAYSYRIGRYLGLSVTARYIRSSYGELFTNNALGFDVAAYARIPLNRMLEGAWVSAGAKISDFGFTFDDSNYDLPTKFSVGGSLFAPIRDSHSLEASVDLGYRYSSSENKSFGMGIGVEYVLMQMIAVRGGYHVADSHGYDYGTIGAGLRFMHLELDFSYLFAAKKCPWRNTYQVGVGLYFMKLKNLLFVFCLALLAGCQKDPDTESTPVRDTDKVEGVIRMKLDRETAEALNVIRTRSGRVLTGNISFDELCERYNVTGMERLFADNGCAERTRKAGLDLWYIIRFEGSAEQVAEDFGEIAGVNHVEIPRRITKVGGMSRKSGTPWRKLMALPKAAPSNYPFNDPLFGGQWPLYNDGTINANAQAGADINVLPAWEKTAGRSDVIVAVVDEGVEYTHPDLAGNMWSGIGKNFCDRDNDDITWGEGHGTHVAGTIAAVSNNGIGISGIAGGTGGGNGAKIMSCEIFHPTDGHYDANSNATADAIKYAADNGAVICQNSWGYAAGALSYDQWSSADRATKEAIDYFIRYAGMSPDGETQTGPMAGGVVIFAAGNENSGQPGYPAAYEPCISVAAVSCTYEAAWYTNYGPTVDICAPGGGDAADFSRPIHYNEGYNLSTLPTDLQNGMTFVYTNFRGEVETHTIDYVSETLGYGYMQGTSMACPHVSGVAALIVSQFGAPGFTNKQLKEKLFSTARDIDSYQGPIYNGRGTYAGKIGKLVDAGAALDSGEVPPVSDQPTITPAVGQSDTFSLAENAVKTLTYTLAHYTDWSLNDPTGKIAQSIDGNVVTLTIDASQYAAGSYTAELLAVNGTKTAKRTIAYTVSEGDNPTGISMDFYPNPCTDVLNILPNYSGESTIRIRNSMGTEVMNITLGLINEEPVKLDVSGLASGTYLVQVTYNGIQITRTIVKRMKLLEGKVAVVTGAARGIGKAIAIQFAKEGANVAFTDLAIDENGKKTEEELNALGVKAKGYASNAANFEDTHKVIDQIMQDFGRIDILVNNAGITKDGLMMRMSEAQWDAVLNVNLKSAFNFIHAVTPIMARQRSGSIINMSSVVGVSGNAGQCNYSASKAGMIGLAKSIAKEMGPRGIRANAIAPGFIITEMTNALPEEVKQGWYQQIPLRRGGTPEDVAKVALFLASDLSSYVSGQVIHCCGAMNCMKRDSQVFDLISEERNRQMHGIELIASENFVSDEVMEAMGSVLTNKYAEGYPAARYYGGCQVVDKVENLAIERVCKLYGAEYANVQPHSGAQANMAVFFAVLKPGDTFMGLDLAHGGHLSHGSPVNMSGTYFKAIGYQLDPKTERVDYDDMERKALEHKPKLIVGGASAYSREWDYKRMREIADKVGAILLIDMAHTAGLIAAGLLENPVKYAHIVTSTTHKTLRGPRGGIILMGKDFENPWGLKTPKGVTKMMSQILNSAVFPGIQGGPLEHVIAAKAVAFGEALDPSYKEYQKQVQKNAKAMAEAFTKRGYKIVSEGTDNHLMLVDLRTKFPELTGKLAEKCLVAADITTNKNMVPFDSRSPFQTSGLRFGTPAITTRGLKEDKMEEIVALIDRVLSDPENEANIAAVRKEVNAMMANYPLFAWMKQVVEFLTLLHENNDKAWFDSHKEMYKRALSCFEVFTAKLIDGIAAFDPSVRGLTVKDCTWRIYRDTRFSPDKTPYKTHMGAFVAPRGKKGGYSGYYFHVEPVWDERSWSQGHQLTTGLYCPLPEVLRSVRDEILDNGAEIEAAIREAKGFVLDESNKLKRLPKGYAPGSPYDEWLKLKDVYITERLAPEFMLDKELLKNTLHEFRKTKHFSDILNRAVQFAYDEMIMLVSMLFVTACTEQAPRIAKYTDLYAVKGTDSLFLDRYTAVSVEQDDARPCLVFVFGGGFIAGERDAERYLPFFHYMVNQGYDVVSIDYRLGLKQVVASGDLSPENMMLGMARTISMAVEDLYDATAFIVDKADEWGIDSSQIVACGSSAGAITVLHGEYALCNASPLVQHLPVGFRYAGIVSFAGAIFEMGEELRWASQPAPMMLFHGDADANVPYNVIRESGVGFFGSKYIAGQLRAMNSPYYFYSVENASHVIATAPMDGNRDAIDAFLSKLVVDKEPLMIETDETTIGAPEVRKNFTLAEYIASNFLMCGIVGYVGKQQAYPILIKGLHRLEYRGYDSAGLALVNREGVLNVFKSKGKVADLEHFVESKDLDGTIGIAHTRWATHGEPNDINAHPHYSDSGNIALIHNGIIENYRVLKEALIENGYTFKSDTDTEVLVNLIEYIRTSNNCTLLEAVQQALKQVIGAYAIAVVEKGNQDQIIAARRSSPMVIGIGDKEFFLASDAASIVEYTDKIVYVNDGEVVVMDRNHPLKIVTLDNQESKIDIKKLQLSISQLEKGGYPHFMLKEIFEQPKTIVDCIRGRINPETYDVILSGIMDNRERFLNARRIIFVACGTSWHASLIGEYLIEDFCRIPVEVEYASEFRYRNPVIYPDDIVIAVSQSGETADTLAAIELAKQNGAFVYGICNVIGSSIARATDSGTYIHVGPEIGVASTKAFTGQVTVLTMLALMIARVKGTIDQECSRKIAKHLLDLPAVLEEVLRLNDRIADFSKIFTYAHNFIYLGRGYNYPTALEGALKLKEISYIHAEGYPAAEMKHGPIALIDAEMPTIAIATPDHTYEKTASNIEEIKARGGKVITVIAKGDEQVRKSSDYFIEVPVVAECLMPIVVSVPLQLLAYHIAVNKGRDVDQPRNLAKSVTVEMKAGRKREFVLNFPRRILSKTMSKIVKGKSNRANLHAKIAEPNPIFYKNSARMHLPRRSIYNEIKDPIFLNKRIRNVRKTGYILRILSRFMDKVKSYIEKNKDRFLNELFELLRIPSISAQSDHKPDMTRCAEWLAASLMKAGADHAEVLPTEGNPVVFAERIVDPKAKTVLVYGHYDVMPVDPVDEWRTSPFEPVVKDGRIWCRGADDDKGQLFMHAKAFEAMCATDSLPCNVKFLLEGEEEIGSPSLYKFCADNKKMLKADIILVSDTSMISMQIPSITCGLRGLTYMEVEVTGPNKDLHSGLFGGAVANPANVLARMVASLIDENGHVTIPGFYDDVRELTAAERKAFNKAPFNLTEYKKALEIGDVEGEAGFTTIERTGIRPSLDVNGIWGGYIEEGTKTVIPSKASAKISMRLVPGQDFKKIAKLFEKHFKAIAPKSVKVKVKFLHGGMPYVAPTDMPAYKAAEKAIADTFGKKPLPFYSGGSIPIISGFENILGIKSLLIGFGLAEDAIHSPNESYGLDQFYKGVETIPLFYKYFAEKMKNILLILAAAIMLTACGGNSRQKTTAGVPDMHNAENALDYQGTYKGVFPAADCPGIEIELTLHNDNTYTMNSSYMDRSEEPIQQTGNYTVKGNLLTLRAKVGIGLPAPEYYKVEENRLRRLNAKKQPITGELADQYVLTKMTLIKSISGIRGTIGGPATENLTPLDIVKFTTAYVRFIAESAPGKRLKIVVGRDARISGEMVGDIIEGTLLGCGADVVNIGLCTTPGTELAVTAHRADGGIIITASHNPRQWNALKLLNAEGEFLSDAEGKRVLALAEDENFVFPDVDHIGKVVSRESYNDEHIRRVLALPLVDAEAVRKRHFKVIVDAVNSVGGIVIPKLLRELGCEVVELNCEPTGEFAHNPEPLPENLTEISKAIVREKADLGVVVDPDVDRLAFVSEDGSMFVEEYTLVAVADYILSRKTGNTVSNLSSSRALSDVTQMHGGEYFASAVGEVNVVAKMKEVGAVIGGEGNGGVIYPELHYGRDALVGAALFLTYLAEKGMTMTELRKTYPAYFASKNKIELTPAIDVDKVLREMKSRYANEKVNDADGVKIDFPENWVHLRKSNTEPIIRVYTEAKTMAEADALARRIIAEIKQICNIMRTIPSSELIINDDGSIFHLHLKPEQLADIVILVGDPGRVAMVASFFDTQEYSVSNREFNTVTGTYKGKRMTVLSTGIGIGNIDISVTELDALANVDFATRQEKAQKRQLTLVRLGTSGAIQPDIKVGQFVFARTSVGFDGLLNYYKGRNEVCDLEIEKAFMKHTGWSDLLPKPYFIDADPSLAELFRDVTIEGITIAAPGFYAPQGRWVRLEPADIHLNEKIESFDYHGRRVTNFEMESSALAGLAALMGHKAATICTIIAQRIALDACTDYKPFVRKMIQTALDKLATLMKFSVSSSALLSLLATTGKVISNKNTLPILDYFLMELKGDELRVTTSDLETTLVGSIRVDGVESGGTIAAPAKLMLDSLKEFAEMPLTIEVNDQNWEIRLSWKSGSLSIPGASAVSYPAIPALSADCKELTLDVDVLVNGINKTIFATADDELRPVMNGVYINLAPSMLTFVGTDAHKLVKYEVETANEVASSFILPKKPANLLKSVLLKEEDAIKVSFDSKNAMFQLKNHTLVCRLIEGNYPNYNAVIPTANPNKVLVDRIELVNGIKRVAVCSNPTTNLIRMDIADNRINLTAQDIDFSVSANETISCSYEGQNITIGFKSTFLVEILSNIDTPTIVIELADSTRAGVFKPVYDDKQSSATLMLLMPMMINAMELNLKRPIIFFDLETTGIDIARDRIVEISMVKVMPDGEEIVRTRRINPGMPIPAEATAIHGITDEDVKDCPLFPQIAKSLAQFIEGCDFGGFNSNRFDLPMLVEEFMRAGVDVDFRKRKFIDVQNIFHKMEQRTLVAAYKFYCGKDLADAHSAEADTLATYEVLKAQLDRYGELQNDVAALAEFSTRAESADFAGRILYNEKGEEVFGFGKYKGRSVAEVFRVEPSYYSWMMNGDFPLYTKKIITEIRCREKNEKQMLKELCCTAMLLTAGANLYAQEPQSIEKSQTIVYINGAKYYVHNVRHGETLYSLAKTYGVAEQVIAAENPQLAQGLKADQSLKIPVVETGVVVQEQLSPKKLKKTFDQHTVQKGETLYGISRRYAISVETIMEDNPGLDPIHLKPGSVILIRKKAVGKTDEAENTAAWEQYKDRLNLVAEEGYMYHIVAPGETMYALSRRFGTTVENLERLNGISAQDLRSGSMLKVPGDAKSATEPAPEERFGQPEPTESDTLTTVEPQVKEVDFLALSSGEPLRVALLLPMTDGDKQNPNYLDFYQGFLLGLEKIKTQYGYSVRVDLFNTRQESDRLRTIVDDADFRAARLIVGPVYEEELPAVIGYAEEYAVPVVSPLADVKNVDSDVLFQMAPPQMRKYAKIEELTQGEHKQVILIYGEKNDREFEREILAALQGVPYARHNYRYAVKEGDQGLSSLLANGKDNLLIVLSDSGLEVDRILAAIASANTNLVARGKTPPRFTIVGNSRWNRFGNLDRALYFKDRLVLFSTYHAKRDAEVIKTFDSDYIKAFGALPSLYSYRGYDAAMIFVPAMYSDIQYDMEGRRYTPLQTSYTFQQMPGGSNHVNQNWMRVSYRPDFTITVDMALIPNGIPEKTIERLSEYRRTLLACHREGITHIFSHVLAGIHGITAVQVRRDLMLIGFSSDTKKGYDVKVLIDFISNILDSESPVNIAVIGMGHLGQAITKYFNGKSLKLRITVAFDVDPAKVDTAIDNIPCYHMECFEKVVQENDISIVIVSSPTKVAPELVVPIINAGIKGVLNFTSTRLNFPQGIYVENYDITTLLEKVAYCVKESEENNDNNMRVFHGFENLPSFRSPAATVGSYDGVHSGHRVLLDRIRREAAAVGGESIVLTFDPHPRVTLGTQERLRLLTSLEEKIYLLDRFGIDNLIVIPFDRAFSRIPSESFVKDYLIGKVGVKNLVVGFNHRFGHDKEGDYRLLNGLHDEFGFRVTEIEKQDVDAEKVSSTVIRRLIERGEMNKAARMLSHPYLLAGDVDCAGHIASGEALKLLPPPGEYPVRIEGRPGVLRITAKGTPELLRTAGKMPSGHILIEFMLTRDFKFRVWYKDTDQMGIVHHSNYICYYEAARSELLRSFGSSYADMEEKDGVMMPILEVHSKYLRPAHYDELITVRISLRELPKARITFEYEIYNEAGELLNTGSTVLGFIHRDTRRPCRAPKGFMELLEKNLMKNGKIGVTTENIFPVIKKFLYSDHEIFLRELISNSVDATQKLKALSSMGDVKGELGDLTIRVSADKEAKTLTVTDRGIGMTADEVERYINQIAFSSAEEFMEKYKNQAIIGHFGLGFYSAFMVADKVEIFTRSYKEGAKTVHWSCEGSPEYEMEETAEQRDRGTTIVLHLSADTLEYGEDSKVEELLRKYCRFLPVPIAFGKVKEWKDGKYVDTNKDNIINNIAPLWTVKPTEITAEQYKEFYHELYPIGEEPLFSIHLNIDYPFHLTGILYFPKIRNNFEIQKNKIQLYSNQVYVTDQVEGIVPEYLTLLHGVIDSPDIPLNVSRSYLQSDSNVKKISNYITRKVADRLQELFTTMRADYEQKWDDLKIFIEYGIITDEKFAEKAESFMLWKTTEGKYFTAEEYKEVVKGNQTDKNGTVVFLYVDDPVEKNSFLESAKAKGYDVLVMDGQLDNHYVNWYESKHKDARFVRVDSDVIDKLIQKDETLKMSLSEAQQEIMRPVFESQMPKDEKIHYNISFEAMAADAAPVVITQNEFMRRMKEMAAISGGGMSQFYSQMPDNFTIAVNGNNPIVIDILADVEKSYGDKLKTITKKIDAAVAEERRFDEVVKGKKEEELTPEEKSTREELSKKIVTLRDERDTRLREIGGENKLVKQIIDLALLSNGLLKGKNLTEFIQRSISLIEKMALAITKDNFEEISASQLPVVIDFWAEWCGPCRMISPIIDELAGEYEGRAVIGKCDVDNNDDIVGKFMVRNIPTIVFIKGGQVVDKQVGACTKADLVKKLEKLLMPDFVHLHVHTQYSILDGAAAISPLIKRAKALGMKALAITDHGNMYGVKNFHDVATDAGIKPILGCETYVVRNRFEKDKDEKAGDHLILLAKNLTGYHNLCKIVSYSFTEGFYYKPRIDKKLLEQYHEGLICCSACLGGEVPQAIMRNDMEEAEQVVRWFKSVFGDDYYLELQLHPSGDPRKDADVYENQLLVNKALLELSAKCGVKYICSNDVHFILAEDAVAHDHLICLNTGRDLDDPNRMRYTFQEYLKSPEEMAQLFPDHPEALATTLEIADKVEEYKLTHAPLMPNFPPPPEFHMPFEELRESLVKKIEDQEELARIDACHSVEELDAWAEESKERSEKLMTAKQFCYLKDLTYKGAHLRYGAELSEEVEKRIRYELSTIEWMGFPGYFLIVWDYIRAAREMGVSVGPGRGSAAGSVVAYCLKITNIDPLKYDLLFERFLNPERISLPDVDVDFDEDGRDDVLHYCVHKYGQKRVAQIVTFGTMAPKLAIRDVARVQKLALSESDRLAKLVPDKVTPDKKAGETPFDFCYKESPELAAERESPNQLIRNTLKYAEKLEGSIRQTGVHACGVIIGQDDLENFAPMAIAKDADLNVVEFEGKEVESVGLIKMDFLGLRTLSIIKDAVTNVKNVHGIDVDIDNIPLDDAPTYEVFSRGDTTGLFQFESPGMKKHLRNLKPNRFEDLIAMNALYRPGPMEYIPNFIARKHGLEPVTYDIADMEEYLSDTYGITVYQEQVMLLSQKLAGFTGGEADTLRKAMGKKQRAVLDKMKPKFIEGCSKRGHDAKICEKIWGDWEAFASYAFNKSHSTCYAYIAYQTGYLKAHYPSEFMAALLSRNLSDIKQITLYMNECKRMGIRVLGPDINESLNNFSSNKEGDVRFGLAAVKGVGEAAVESIVAERNKNGKFKDIYDFFERVNYTAVNRKCLENIAYAGGFDSISGFHRCKFFGTDLRDSSSTTFIEQLVRYGQRFQSEKDNAQQSLFGGGEGVVDIQHPVIPACQDWSTLETLGKEREMIGLYLSAHPLDDYAVIIRNMCKTQLSDLDNLESLRGQEIAVAGMVIATQNLVTKTGKPWGKFTLEDYNGTHEFALFSKDYENFRKYLFNDYFLFIRGKVQPKPYNDKELEFKITSMVQLSEMRDTMIKEMYIQLAIEDITREMIEELTHRIKESEGSTTLRVNVYDRDAQVSVNMFSKRHKVSLTSNLVSFLEDNEIKYTIVMQDRINPAINKIRFFSECCKIFATYFLSRHFQQRRIVRAIFTWKYGNSFIFFHYLMTIAASNPKDIYSHPLAALKFRPFLKCGYSEYRISNEVHIFYMKDEKLVVLREWNSVTEAEMAKSILDGAGIFSTIRNEYMSAIYPIGTMPAQLVVKEEDAKRAAELLDKMPMKRYGLIGYPLGHSFSARYFADKFAREGIADCRYDLYELKTIEELPALLEAQPELRGFNVTIPYKQQIIPYLDDLSPETRMIGAVNCVRCEGRRLTGYNTDVTGLRASLETFLGGERPERALVLGTGGASQAVQYVLAQMEIPFDLVSRNPATGNYTYDEVSDEVIGSHRLIINASPVGMHPNVEEAPRIPYAFVTPSHYLFDLIYNPAETLFLQYGAQRGAHTCNGLDMLVGQAEAAWAIWNRMKDELPNFLLERIMFRYVLLALKGCAMGMADVVPGVSGGTIAFISGIYSELIESIKSFNPTALKLLGRFEFRKFWRHINGSFLFSVLLGIGIAIFSLARLMTYLLAHHPIEIWSFFFGLIVASAAFVARDIRKWNLTSLLGLLVGTALAFWITIASPTQTPNDWWFIMLSGAVAICAMILPGISGAFILLLLGKYQYILQAVSEFRLGVLLLFAVGAVAGIISFSHLLSWLLRKHHDLTISLLMGFMVGSLNKVWPWKEVVETYTDAQGAVHPLVEQNITPGHFEAIGQTDAHLWQAVALALAGFLLIYVIEFIGKRVAQKISAPQNMDFFRVLSRKNLAMFPAYTIFAQAKHRRKRQYLCDVIIMPFLRNVVFSTNEITFRDYILMKDNRVLLGFSGGIDSFAAVGLLQAAGYHVTALTLDMRGDSALLEKARLRAGALGIPWRMRSVRERFEREVVDYFTDSYFRGCTPAPCTRCNSRIKWPCLAAEADALGIRHIATGHYFRITSAGGKRYVTRAADNRKDQSYYLWDLPQEILDRVLTPMGTVIKRNIVEELADRRESMGVCFLEGRPCRDFLRSRDKTEALRPGPIIDSAGHRLGTHDGAALYTIGQKKGLDLPPGWAVVAIDTAANRIVAGEEKLLLHRTLEVGECRLIESDEVFGARDIRAVIRGIGRNPEGYAAVFPAASGIRIELEDPAWAPAAGQPVVLYRGERVVGGGILERYYMAALNTFRTDGEDFGEQILSKVVKAGRRTYFLDVRATRANDYFLTITESRKKTAPDGTVSYDRHKIFLYKEDFSKFLEGLEEVIGFIKREKPEFFEEEHPKPEEYAMKRSMWFFGLLLAVAGLSSFRTADIAVSRPDRAQRRSLAKLERSYEYIRKMYVDSVDMAPLVEEAIRSMVQQLDPHTEYASAAEMAEFWSLYRGKFGGIGIQTQWIRDSLVVTSLLSGGAAEEAGIRPDDRIVRVDGRTVKEIPASELISVMRGDAGSKVKILVIRRGVCQPILYEIVRREIPLPSVELAYRVDSAVGYIKLIRFGQTTMREVQRAYEELDRPKELILDLRGNGGGLLDQAIALSGFFLPKGSRIVSTEGRSVPSVVHSARRNPVFPAEGRLIVLIDERSASASEIVSGALQDWDRAVIVGRRSFGKGLVQRQYLLPDGSALRLVVARYHTPSGREIQRPYVKGGDRTAYRTHPLPDTIPSPAYRTLRTGRTVYGGGGIAPDVCVIQDTVQASYLNALLRKNIFPEFMQRYLDRNRTALERDYPEFASFEERFEVPDEMYEELIGLGLEQGVTPPAEDSDVEAGTRRLLKALLAERLFDREALLRILHARDDADFIRALNLLKNWEAEGLPLLEAQHERQMAQKPSIPKGTRDFSPLEMMRRQYIFDKIRDVFRTFGFGPLETPAMENLSTLLGKYGDEGDKLLFKILNSGDYAAGLNDEELRTASRICEKGLRYDLTVPFARYVVQHQSEIAFPFKRYQIQPVWRADRPQKGRYREFYQCDVDVIGTRSLLCEVELIQIVERVFRTLGINVSLKVNNRKILYGIAETIGHADKMIDITVAIDKLEKIGLEAVKAELTERGIGSDAIEKLQPILELTGDNERKLAVLRDVIGASAVGLEGISEMETIFGYVNRLGVELPIELDFSLARGLNYYTGAIFEVKALDFAIGSICGGGRYDDLTGIFGMPNMSGVGISFGADRIYDVMTGLGLFPADLGCAARVMFANLGEAEEHASLKLLQEVRAAGIPAEIYPENGKMKKQMEYANRRGIPCVVIVGSRELEERVATIKDMTSGEQTQVPFTRLAEALRMADEKIIFSMVGVSKTFTNQKKVLNNIYLSFFYGAKIGIIGLNGSGKSTLMKIIAGIDKNFQGEVVFSPGYTVGYLEQEPKLDDAKTVREVVEEGCASTVALLKEYEEINQKLCEPMDDEEMARLIERQGELYEQIDHVNGWELDSVLERAMDALRCPDPDQSVKVLSGGERRRVALCRLLLQQPDVLLLDEPTNHLDAESIDWLEQHLQQYKGTVIAVTHDRYFLDNVAGWILELDRGEGIPWKGNYSGWLEQKTTRMAMEEKQESKRRKTLERELEWVRMSPSGRHAKSKARLSAYDKLMNEDTKQKEEKLEIFIPNGPRLGDVVIEAHDVSKAFGDRVLYEGLNFSLPPAGIVGVIGPNGTGKTTLFRMIMGLEQPTSGTFTVGQTVKLAYVDQQHKSIDPEKTVYEVISQGTDLIMLGNRQVNARAYVARFNFTGADQEKKCGMLSGGERNRLHLALALKEEGNVLLLDEPTNDIDVNTLRALEEGLENFAGCAVVISHDRWFLDRIATHILSFEGDSKVVFYEGSYSEYEEWKKAQGGDTQPHRVKYRKLVEMGTKITQTGRSAKFICSPQKYGFSAKAREQIAVRPLPSCMRKIISLILCLISLPAAAQIIPPRYAGSDDPDVFRKQFEKKVTKVMKRDGYRIEELSHELLMKFTIDTLGRCVDVQYPDSLGGVRFNPTQRSRELLNTALSELNPFTPAYKDGRKIPYVRKMLINMNFLPGAFVKPTFRGKKDGLMAFREYLNRNLVYDTKLYEAGVYGTVRVEFYIEPDGTITLVGASESPHPALTEHVQKLILDTSGQWTPLLEMGHPCRYLISFPVNFDPGESTSYATGIPLMKKILLLFLSCFSCTIAEAQTTPPLFQGSDDVQLFRQALMERVTEVYYSDGYTPDDLIHYFWMNFTIDTLGRCIDLEIPDTCRRQTIIVKERTLELLRTALAGIDSFQPATERGEKVPYRQTMEYNFAYIPEVTTPACFKKSEPNDLTVFEKYIAKRVEYPEELRPWGVSGRVIIVFIVNTDGSVEIDKVLESPHPKMSYRVKKIILSTSGKWIPALYFGAPVRQKFVLPVDFRLRMVDFSLQIYDKRTGKAIDNRYLFLMFALEFFISVAFCRRNIWTATNYVVFLIKYYTQFPMSKSVKGTRTEQNLLKAFAGESQARTRYTFFASVAKKEGYEQIAGVFAETADQEKEHAKRFFKFLEGGDLEITASYPAGRIGTTAENLLAAAKGENEEWDVLYPDFAKVAEEEGFPEIANAFKQISKVEAEHERRYLKLLSRITDGNFFKRDGKIWWQCRNCGFICEAEEAPKICPACQHPQAYFEPKKDNYMEKFSKIIVLTIIGLSAAGALYVCCSHTLSHRSRTAEIDIPSKPSLPEVRRARLVFAGDLMQHTPQLTAARTPEGDFDFNASFDWVRERFRAADAAIVNLETTLSESGPYTGYPCFRSPAALAEALDSLGVDITVLANNHCCDGGSKGIRTTIRELDRHGIEHTGVFLDSSDFRARHPLRFEAGGIRFALLNYTYGTNGLPVPSGLSVNPIDTVRIAADLAAVEHDGVDCVIACMHWGNEYERRPNKVQRQLAGFLRRHGVDLIVGSHPHVVQPYEQDSNGIVLYSLGNFVSNQRKRYCDGGIVATVEVTRSPDGSLRYSLELTPVWVLTPGYRITPSEVGDTLSMPADSRLRYERFMTDTRLLLGLMNNLRGVLYAVVSSATFGLIPLFSIPLLQGGMSSPAILFYRFGLAAAMMGLIALATRRPLRITWPQTGTLLLLGAMYSVTALGLLRSYTYIPSSVATTINFLYPLGVAIVMTLFFREKNSVWLLVAILISLVGVALLSWGDIGGPQSDRAIVGVGFAGATVLTYTIYIVGVKKSRISRLDPMIQAFYVLLFSACFFLVYALSTTGAPLPGKWHLWQNLLLLALVPTVVSNLTLVLAIKEIGSTMTSILGSMEPLTAVLVGVLHFGEKFGLDSASGLILIITAVIIVILQAKKKEHPQTLPHESIHMEFLMEYHLAGIMIGVATFLIIGIFHPLVTKGEYYFGVRIWWIFLLMGIAAVIGSVLVENIVWSTLLAVWGASSFWSIGELFEQRKRVEKGWFPKRPEKKERMSSSFAAKIRLSRGQKQIYLYFAEAEYLRRSQRLGLSFGKSKFYLHFAEAGRSQRYGKPRENGNLFTVFRGASYLLQRMSKGKYVKRTFPLAGLHCAGCAARVEKILNAQTGVVAASVNLAASTAAVEYDTMQTSPERLRQAVQEGGYDMLADSDDDTPDELERMNRERYRDLKRRAFWAVVLAIPVVVIGMFFMDMPYGGAIMALLSAPVVFWLGRGFFVNAWQQLRHRSATMDTLVALSTGIAYLFSLFNLVFPEFWLSRGVEPHVYFEAAAVIIAFILLGRTLEEKAKGDTTASLKKLIGLQPKNAIVVAADGTQTEIPISRIRVGDLLAVRPGEKIAVDGAVCEGDSYVDESMLSGEPLPVHKEPGTKVFAGTINQKGSFHFRAEKVGAATMLAQIIRMVQEAQGSKAPVQKLADKIAGIFVPAIIGIALLSFVLWLVFDPSGGLTHGILAAVTVLVIACPCALGLATPTAVMVGIGKGAEKGILIRDAVSLETAGKIDTVVMDKTGTLTEGKPVVTDIVWANGDDRAKAVFFSLEKLSEHPLADAVVHYFAGVPTLNVERFGSLTGKGIEGTVDGVRYFAGSRRLLDEQGIVVGKELNIEAQRLSAEAKSIVWFADSEQALAVAAIADRIKDSSVEAVRELQAAGIDVYMLTGDSRAVAGHIAEKAGIRHFEAEILPQDKAAFVKRLQTLGHKVAMAGDGINDSAALAQADLSIAMGGGSDIAMDVAQMTIISSDLRKIPEAIQLSKQTVRTIRQNLFWAFIYNLVGIPVAAGALYPVSGFLLNPMIAGAAMALSSVSVVANSLRLKYRRMKLFIKNMVCPRCILVVRDILRQAGIEASSVVLGEAVLPAELTAERRKELDEALRAVGFELIDDRRKQTVERVKNTVIELVREKDAALRTNLSDYIADRLHQDYGAVSSLFSEIENTTIEQYFIAQKIERVKELLAYGELSLGEIADKLNYSSTAHLSAQFKKVTGLTPSHFRKIGENRRKPLDKVMSGSYGENETLDRTYSEFRNSGYSLDSEDRGRITSRNIRELLSLVYKINDRHSIGLGGQIFMGASDPSNTVHTTSAGLAWGDVPPQMPEAGYTLYRYGGTLYNRQYQGSLNYIFRFDTLGSRLSFKADYLHQNVDRNYDYDTRDFSRPEDAEPFSTELRRERYKLLGHLFASRLDLNKNFSEERSFSAGLSYDLRYADNNAPVHRFEEEEWIPDPKMSTWFIDRTQSTGAYTQWADAYGKFSYQAGLRLQWDRIAYRNAENTGYEHRDYWRLFPELSLAYTFNPEKGTNINLDLYRSSGRLPDNNALSPRRVWQSQYSYTVGNENLEPGWGYDIDLSYTLRNKLTISYGGTWSRGSETMTFYDPDDPNIVYTTKVNGEHGSAHNIWIDYTTLVTKWFRVKSFIHGYWYRREVDGDWQASYSAGGGMFSLSLMFQPHPSMIIYLDGGVELPQKRLETWQNSYWALAAGITKSFCKDKLYISLDVNNILSTKLKKETVRWDNSYYSVLRQPRGHRSLRLVFSIGYRFNRNAKKSVSTVQTLRDPEEILKMLLAVSAASVSAQTYQIRKDSVKTGEYSPTVYLVSVNAPQPPADEEALLEAAVLNQLAIDNAIRDYIETHHPGFQQDELPHFIFATKQNKFSFSLGGQVTLRASYDFDGISGAQDFIPATIAVPGTYATRQKFGLDGTTSRIFLKAIANSKKLGRVTLYFSTDFRGGGTNSYTPRIRSAYVSFKGFTFGRDVTTFCDLNAAPNTIDFQGPNAYNYFFSTMIRYEHSIYRDILKFGVAAELPNVSGTYGDSFASIPQRVPDFPVYMQVNWGRNKESHFRASAVFRDMYLHNESTGNNTSLFGWGVQASGNIKVAGPLQLFFNGVYGEGITPYIQDLSGIGLDFTPNPHNPRSIQTMPMYGWQAAVQIDLVPNKLAISGGYSMAEVCRRNGAYADDEYRRGQYVFGNIFWDLAPCCQLAAEYLYGTRENMDGMKGHANRVNLMVRYNFMKHKLVIAMTAATLFLVGCGQRQHTEQVTLVRIDTVKTANTCDILEFPARVQAAGEVHLAFKIPGTLQRIYVDDGAFVRQGELVAEMDPRDYELQLQAVEAEYLSIKAEAERVMALYDQNVATADAYDKARYGLQQITAKYENARNQLADTKLYAPFDGYVKRRRFDPPTVVAAGMPVITFLSGKNPEVELFIPASTYIRRREIASFAAVFDFLQGQKIPLRLLHVDPSANANQLYAVRLALPVNTEIAATPGMNATVEVAMRQETEASVEIPASALFSNGDKTSYVWIYRQDGTIARRRVEVVRLHTDGTATIADGLNEGERIVVAGVHKLTEGQRVAPLPAPSKTNEGGLLMIDLGKWAFGHSKLVYFLLAVLLVGGLKSAYDMGKLEDPEVKVKIAMVVGVRPGASAHEMELEVTDPLEKAIRTVGEVDNTQSWSYNDLCIIQVELKSTTPDDRLEQCWDMLRHKVSDAEASLPGGTSVTVQDDFSLVYGMFYALTAEGFSERQLADYAGLIQRELTDLDGVARVELYGKREESIDISLRADRMATLGISPTEVLATLNGQNGTFYAGYYDNGDQRVRVTVTDKSRTVEQIRNMVIQGHEDDQLRLGDIATVESGYTEPVRNSMTYNGEHAVGIAVAAASGTDIVKVGNAVERRLAELQEERFPAGVACHKVFYQPERVTGALSTFFINLVESVLIVIAILMITMGFRSGVIIGFSLLTIVIGTFLLLGMTGGTMQRVSLAAFILAMGMLVDNAIVIVDGILVDLKLGKPRREAMCAIGRKTAMPLLGATVIAILAFLPVFLSPDTAGVYVRDLFIVLAASLLLSWVLALVHVPLMANRLLKQPSRTEGSGKLYDSTLYRRFGDLLRFGLRHRIAALSVILVLLGLSVWGFRYVRQGFFPDMVYDQLYIEYKLPEGTNSTRVAADLREIEAYLKTRPEIRNVVASVGGTPARYNLVRSIATPSLSYGELIVDFESPESLVENMDVIQEDLSARYPDAYVKVKRYNIMFKKYPIEVQFSGPDPAVLHRLADSARMIMARTPQVAQITTGWEPAVPVLAVDYHQAAARRANLSRQDIATSLLTAEGGIPVGTFYEGVHRNTIYLKCTAADGSRIDNPENVPVFPMLPNVNALLDDELVGSLQTGTLDKGDIIRRLAQTIPLGQVGRGVGIRWEDPVIPRYNGQRMQSVMCSPAPGVETEAARQTIAEQIEDIPLPTGYSIRWDGEKGARDQTMYWLFKQVPLAVVLIIAVLILLFGDYRKPTIVLCCIPLLAVGIVGAMLLTGKTFDFCAIVGALGLMGMLIKNCIVLLDEIGQRCSGDTDLIAGLVVSAQSRLRPVMMASLTTILGMIPLLGDAMFGSMAATIMGGLFFSTIATLLFLPILYALFFKIKTKMLCRGGVSKTKSKIGIKPSAKANLFAFCRGGVSKTKSKIGIKPRAKTNLFVLCRGEVSKTKSKIAIRPRAKANFICVLPQRSTSKIVKAGSVCTRRSALRRRSGEHCVAVVRCARRISTPFAPHRCGTNGKVWPAAESYYFVLILKNRAMIWFLLLLSLLFAGVDFLFYRVRMRRHSERLRRAFVWFAVFSDALPIVVVLLLKAVPDNTTGWMQAAQWFTFVFLLLIGCRYGYYFGLLFDRHRSFSRVGALFAVGCAVWLVWGAAWGRQALRVNEVEIRTAALPAAFDGFRIVQFSDLHIGTLVRPEREMNRLVDTINALRPDLVVFSGDLVNVRSTELTSDVLAILGRLRAPYGVISTLGNHDVGLYIKDTVALPRAENNRQVIDRQRKIGWRMLLDSTLYLRRGSDSISVTGISFDPTLQKFRHSFDLPEISLATAYEGMPEGMFNLTVSHLPQLWPNITALGRGNLTLAGHVHSMQIKGHLFGRAFSPAQLMYDRWSGRYDDAAGNTLYINDGIGYVGFPMRLGADPEITLFTLKKMKVTVSTAVSADGYLDDRSPDRLILSTPEDWAEVHRLRAACDAILVGAETIRRDNPSLLVGDEVLRRERIDRGLSPDPVKVTLTASCRLSPEANFFTRGDQEKIVFTSCSDPGPLRQVATVIPAAEITAALIVTELEKRGLRSLLVEGGAATLRMFFAENLVDTFRLAVNPAVKVGDPRAPRLEVGSGYLQTPHSTESLGGMRVTTYAIKPDRTAEDRRYLQMAIDESRKCTPSTSSYCVGAVIVTTNRKIFTGYTHETSPTHHAEQEAILKALAAGVELRGATIYSSMEPCSERKSEPESCSELIIRHEFRRVVFALYEPDCFVCCQGALNLRRHGIEVSVDETLSGQVRAINAHIGHMNRVIVSFFALLAAAPLAAQEQTPRVLSLDEALEITLSGSPVIEASRYEEKAAQQERRAAIGLRMPQISVGGAYTYLGKDIGFDFNDLKGPVGNITHDILGSGLIPTELIPQIQQLLTPVMGADWFLTLQDRSLGFVGGQVTLPIYMGGKINTANRAAKINEKTAVEQGNQNRNALVSELVERYYGLALARQVVEVRQQVVDGVGQHLKDAIALEQNGMIPHSERLYVEFKMAEAERELQNARLQVETIASALNNTLGQQAEVLPVTTMFVLGNLEDVAYYKDLAAKFNPLLSQVALKRQLAKEGVRLQRANFLPQVAAMGGASFYNYQVTKIMPRWAVGVGVNLKIFDGLNREYKYSAAKQTVKQVEVLEMKAGKDIAVLIEKLYNQMNNYANQMKSIDASLAFAEEYLKAKNAAFLEGMSSSSDLVDAELNLAKVRTERMQTAYNYDVALAKLLEAAGISDEFISYLHRTDARPIHFDKEMKKSTIVTIILIAAAVVLGVIFISWYLRKATPLYIQGTVECTTYKASSKVPGRIEEMKVEEGQHVTKGELLYTLSTPELNAKLQQAEAVKSAASAMDQKALTGARIQQKEAALNLWEKAQAGLLLAQKTFDRVNNLYEQGVVPAQKLDEARANLQAMQATERAAKAQCELVFDGASKEEKEAAAAQVRQAEGAVSEVESYLSDALVYAPVTGEVSTIIAEAGELVGTGYPVVAILDMSDVWVTFNIKEDLMPDIHIGTRMTGYIPALDRSVEFEVTYIAVQADFATWSATRTQGGFDIRTFAVKAKPTQDVEYIRPGMSVLVNWKDIAKMPGFFSNTLAVLRREIYRVARQPMYWLLTVILPIVAFAFFAVLLYKGVARDIPIAVVDQDNSTLSRKVTQMIDATPTAWVAYGVQGMEEAERLMLQGKVMGIVLIPDFFEKNILNNSQTHLESYLTGTNITVNGLLAKDLQTTVTTFTAGIQLQLLMKQGLTEKQAMAQLMPVRFDKHVLFNPHINYGYYLSPSFMPMMLLIFTIMATIFVIGTELKNGTAREWYDTAGGSVFAAYAGKILPITVIMFLMSELMLLVIFKVVGVPLNGSLTVITISNLLFILSYQSLGAMIVTVLSNLRLSLSIGGGYSVLAFTFSGLTFPIMAMSKPMQWFCCIFPFTFYTDIMVDQALRGAPAIYSLPDMGIIALFIILPLLCLPRLRTICTNKKYWGRLMSRFTKQITSYWQQFRTVVRNEYGSIFTDAGVILVLVLALLIYSTLYSLAYGTQVLRNVPIGVIDMSNTSTSRQLINTFNAGPNVYVAYEPGDMDEAKHLFYDREIYGVVYIPSDYEEKLLGGQQAVVSLYVDASYFLMYRQAFQELVSGIGTTGAMVEFQRLIAKGANIPQATATTQPVIYQSHNLFNPYLGYGSFVMPAIIMVIIQQTMLIGIGMIGGTWSEFGLYKKLIPPGRRRMSTLPVVAGKAFVYASIYAVTLFYILGLHYKLFHFPTNGHTADIIAFLIPYLLSCIFLGIAVSTLFQRREQSIMLLLWCSIPALMLSGASVPREAMPEWLYRFGQILPSSSGVEGFIRLQSMGASFSDVLHEVRILWILTIVYGGFAAVGIHLRLKQAAGKMKRLVFTLFTVFAATALCSAQNPNETRVVKDAAGRVKYTVHKTGNREIIKDSKGRITGTTRETKERKYYYNSNGSSAGTETKWEPASRQRKSHHTASPESNDRKMIRAICLLVFLCTIGLARAQAQSGVITLTVVDAETGEEVPGAVIEIVPKAHPDQKKYYTSGYKGALQVRGLAYGSYTLAVTFMGYEKAEKEFRVTQPSENLGKIALREAAIAIETVVKEVQALRTSQKGDTVSYNANAFKVTADADVEGLLKKMPGIMVNNGAVEAQGETIQKVFVDGKEFFGEDVTSAIKSLPAEAVERIEVYNKLSDQAEFSGMDDGESYKAINIVTRENMRQGIFGKAYAGYGYDADTETEAKNKYMVGGNVNFFSGSSRLSLIGLFNNVNQQNFSFEDILGVTGNSGGGHGGGRFGRGVGQYMVRHQDGVASVNAVGVNYSDTWGSRDQVTFQGSYFFNGTRTVNRARTERWYEDPAPIDTLFTDGYSRTQNFNNRLNARIEWKIADNQSLMIRPGLSFQSNDPFSTTYGRQFGESGYSVIDNFEDAFRNGYSVNTSAIYRVRLGKPGRTLTVDGFFNYFDSQNKQNSHTNDFGIYEDYPDLDPDPDENDLKKLIYQRMMNPSYRYRLNGRLTYTEPVSKYSQVSLGYRTSYNYQQSDKKTYRTGEDYDITGLLPDPLLSNAYKSSYTVHSLGPGFNYSKDRNTFAANVYYQRSSLSGEVIRTGSEEIKHAYNNVTYFMVGQFNLNRENTLRMFLRSYTDNPEVTQLQNVYDVSDAQYITRGNPDLRPSYSHNLSMHYVNSNAEKGRTFMLMFRAETTQDYITTSTRYRPTLEIDNTVYRPLQFTEWTNMDGYWDVRARASYGFPVNFIKSNLNLRGGVSYSRIPSLVDGERNNTGNLGYEAGVVLGSNISENVDFTLSWDGTYNEAVNSLAATGGKNRYFNHQAAASFKFIFGRGFSLSGSASYIQYLGFTNDYDDSYLLCNLFVGKKVFRNQLGEINIGVNDIFNQNKAFVRTTGSGWTQNSWNSVVGRYYCVQFVYNLRFFGKKGSKNIKDYQGVSDRPSGAVGMGRSTAPGGGFRPPHRMKAKFLIVVLAALVLATGTVWAQKGHHNRRAEHKELTTEQVAKKMTDRMKENLSLSDEQVKQVYPICLEQAQAMREHRAERREMAEKSREAMAQQREQMAGRMKAVLTPEQYAQWIECRECPARKVDCAGPACRKGDANPGHHRRPCNGAPCVDKKMAYIREIRGHTPQVGENTFLAETAVLVGDVTVGRDCSIWYNAVLRGDVNTITIGDRTNIQDGVVIHTLFDGSKHPSQTHIGNDVSVGHNAVIHGAIIEDNCLIGMGATVLDNAVVASGCIVAANALVLSGSKLEPNSVYAGIPAKKVKEITPEQRDEIVLRTARDYQLYASWFKEEMIRHESARLLSSFTIFDIVLDRMRLGKMGTSSHFLSAFTIFAQNRLWLGSPRANSDCYPIIKIWKKGVRLDCGYSLRYRSKYRNNTMKQDKLKATARLLEIMDTLREQCPWDRKQTFETLRNNTIEETYELADAILNKDLDGIKEEAGDLLLHVVFYAKLGEEAGAFDYADVVNALCDKLVYRHPHIYGEVHADTPEEVKANWEALKLRKKNRRSGTLGGVPVSLPALVKAYRIGEKAAATGFDWEKKEDVWAKVKEETAEVEAEMISGDRTAMEEEFGDLLFALVNACRLYGIDPESALERSNKKFMNRFNYMEECASSEGHTLHELSLDRMEELWQQAKHAAAEKEMSCQANKSVVSPVRGTLTKLRFFPKGAIFFKNFAIKKQMKKIVVFLLLVSSLFPSGCTRPKQYADYSRHSCFDRTEIDSATLRNLEVLGRVWGFVKYHHPAFSDDRYDLDFELFELLPLVADTAPAARNEILAQWIDGFGRYKTASEKYEKILASDSVFEHRTDIGWIRDTATLGRELSERLVRLRSADRTAGNRYVSQTYYETYDQWSPNPCFDGEKPYYDLSNPDYGYRLLTVFRFWNMVEYFFPSKYLTDKDWNDVLPEYIRRMAHPTGSYLRETRRMIAELDDNHAQYGGGIFELFGRYRVPLNTGFVEGRLIVVTPDTVPVKSERKAPFQVGDEIVAVEDKPVEYYMAQTREFISCSNGNDVLAATADQILRTKENRPLSIRYRRDGVTRDTLADVTKMPGHFSWNYLWKYHRTFSMLEDSIGYICPDKLSKEEIPEISNGLKKTRGLIIDLRYYPSQDFNEFVSQYIVPDDVKYTVRFTYPDLALPGVFYARDYSYPTYKTEKYNAPIIIMVNEGTQSYGETSVQKIQNNPYTITIGSQSAGANGNISKFTLPRGILGAFSGLGWYYPDGWVVNRQGVKIDHEIRPTLEGIRDGRDEMLEAALSLIEEKTEEEMKRCKITILQRTLNEELAREYAAPGFTRCPMMREGQVFYADYAKPEGFCDEAWKAVYQYVFALSHGAGKFYFGDWITKEGVAICSCNDGLRPVIMKIERTDQDSSIDYEPVEMNISYNWLKRYLKTDLSAEEMATILTDIGLEVESFEKIESIRGGLAGVVVGEVLTCTDHPDSDHLHLTTVDVGGEAPLQIVCGAPNCRQGLKVLCATVGAVLYPNGGEEEFKIKRSKIRGVESLGMLCAEDELGIGASHEGIMELPADAKVGQPAREYLKLEDDYVIGIGLTPNRIDAASHIGVARDLAAYLKSQGKPVELQWPDVSAFAVDNRDLKIDVQVKNSEAAPRYAGVTVKNCKIGPSPEWMQNCLRTAGITPKNNLVDITNFVLFELGQPLHAFDAAKIDGGRIVVRTCEEGTPFVTLDGVERKLTANDLMICSAAKPMCIAGVYGGLDSGVSDTTTDVFIESAYFNPVWVRKTAKRFGLNTDSSFRFERGVDPDIQVYALKRAALLMKELAGGEIASEITDICSAPIEKFKVELDIKRVNRLIGKEIPADTIRTILGALDIKIEAEEGDLWRVAVPPYRVDVTREADLVEEILRIYGYNNIPVPSHVNSALSYAPKPDRNKLMNLAADFLTANGFTEIMSNSLTKAAYYEGLTSYKPEHCVKILNPLSNDLNVMRQTLLFNMLEAVQLNANHRNGDLKLYEFGNCYFYDATAAMPEEPLKAYSEQFRLAIAVTGIAAPLSWNRKPEQASFFTLRAIAEKLLRRFGLDLYTLKSESLRSDLYGDALSFSLNDKARELVQMGVVSSKLRKAFDLKQDVYYLEMDFGALIKATRKNKVTAKELSKFPEVKRDLALLIDKEVTFSALRDIAFAAERKLLKRVSLFDVYEGDKLPEGKKSYALSFVLEDKTQTLTDKMIEQAMANLTAQFERKAGAQVRAMCKDNIFPEKNNGFQALSGADFLPWSYSAAEKNDYFCDHKIESTMIRQYAGLVKFAHTIFAMPFALVGFVYALRTEGISSDCSGRYGWVVLLLQVLLCMVFARNAAMGFNRWADRRIDKANPRTADREIPAGKISARAALRFVIVNALLFVVTASTINLLTGLLSPVALFVILIYSYCKRFTALAHLVLGLGLGIAPVGAYIAVTGHFAWPPCILALLVMTWCGGFDIIYALQDADFDRKNGLYSIPARFSARVSLLFSILLHAVSVAALFWFGSFCPQNGWLWLGEGLFTLILVAEHLLVTPTRQRNIGIAFGTLNGIASTVLAVFVITALLRGMKNIRNFCIIAHIDHGKSTLADRLLEKTNTLNQREMQAQVLDNMDLEREKGITIKSHAIQMEYLARNGEKYVLNLIDTPGHVDFSYEVSRAIASCEGALLVVDATQGIQAQTISNLYLAVEHDLKIIPVLNKIDMDSAMIDEVKDQVVDLLGCDPDEILCASGKTGLGVEEVLEAIVERIPEPQGDANAPLQALIFDSVFNPFRGIIAYFRVFNGTIRKGEHVKFFNTGSEYDADEVGVLKLKMQPRDEIRAGDVGYICSGIKTSSDVKVGDTITSVENPSTEAIAGFEDVKPMVFAGVYPVEADQYEDLRASLEKLQLNDASLTFEPESSLALGFGFRCGFLGLLHMEIIQERLYREFDMDVITTVPNVSYKITTTQGDVLEVHNPSGLPEITKIASIEEPYILAQIITKSDFLGNVLKLCIDKRGIMKNQTFITQDRVEVNFEMPLSEIVFDFYDKLKSISKGYASFDYHRIGFRPSKLAKLDILLNGEPVDALSSLIYADHAYDFGRRMCEKLKELIPRQQFDIAIQAAIGAKIIARETVKAVRKDVTAKCYGGDISRKRKLLEKQKKGKKRMRQIGNVEVPQSAFLAVLKMDMKKTIIDLFESSVEKYGKKTFLLEKRHHAFQPTTYAETREQALEVGAGLASLGIRPKDKVAILAEGSNGWIISELGIFYAGAISVPLSVKLEESNDLLFRLRHAEVKALFVSKQQLPKIRRIRAELPELEQIIVLGHIPLESGETAYGMLKRLGRDYLAGHKEEFLKIGQAIRNDDYATITYTSGTTADPKGVVLTHRNYTANVEQSLSRIDIPSSYRTLIILPLDHCFAHVVGFYIMIACGASVATVQIGATPMETLKNIPQNIREVKPNFLLSVPALAKNFRKNIETSIRAKGPFTERLFDFALRTAYIYNQDGYHKGKGWRILLAPVVGLFDLVLFRKVREAFGGSLEFFVGGGALLDSELQRFFYAIGIPMFQGYGLSEATPVISTNSPKYHWHKFGSSGKILEPLDLKILDEEGRELPRGQKGEIVIRGENVMAGYWKNPDATAATVRNGWLHTGDMGYVSEDDFLYVLGRFKSLLIASDGEKYSPEGMEEAIVDKSPFIDQIIIYNNQSPFTGAIVVPNRDALRRELDARDIREGRAAAAADILGAEIDRYRAGGPYAGEFPERWLPAGLAIVDEPFTEQNGLINSTMKIVRNKVEEYFRDRIDYLYTPEGRELRNDKNLASLRKMVEMTVKDRIMEFCRMSGIKPGRFERECGLSNAYLSKLKHEPSRDKLGKIFARYPELNKDWLLNGEGPMLNVVHYPAMEGGNELLVNDQEYYVGRPAGSDEVLIPRDAWEVIKKQADSFKERDEQMNRVISLLEKQMDKGKMFEKPNEKNYNKYNIILSIMRRQVYKKVIEIAPDLKRQIAMEMGCTVDTVYNALNLSNPTTGAQPDRIRRRAMELGGKENRKIRWINYMRSDLEVSFRRRGVYRKLEETGKSPVSSLYFYLFRLSRLLPVFCRMEVFINHSPVETDAATTLAELLMQEGIAADGIAVAIANKVVPRSEWPTTRLQAGTKITVIRAVCGGMMRIIVITDTSFAASEAESIRILLLEGADRVHLRKPQSAEADMRRLIEALPPELYPRLTLQDHLQLAKEYGIGGVHLNARNPEIPAGFGGLISRSCHSFGEIASHPTEDYLFLSPIFDSISKTGYRAGYAPDELRKAFAQGIINPRVAALGGIRPEHLPALQEYGFGGAAFLGYIWQGATPGELVRRMLEIRKFNRMLQFITHHTDRYDEIAGTRAVLEGGCRWVQLRMKDAPAEEVLRIGREIEKLCREYGAKFILDDHVELVRELNADGVHLGKLDTPVAEARRILGPEYLIGATANTFEDIERGAGQGADYIGLGPFRFTQTKRNLSPVLGLEGYRTIMERCRNAGIALPVVAIGGITAADVEDILATGVTGIALSGALLQAENTLEETQRIIKIINRIKQMSELVIGGRTFRSRLFVGTGKFSSNELMARAIAASESEMVTVAMKRIDMNNPQDDMLAHVRRPEIQLLPNTSGVRDAEEAVLAAQLAREAFGTNFIKLEIHPDPKYLLPDPVETLKATEQLAKMGFVVLPYIQADPVLCKRLEEAGAATVMPLAAPIGTNKGLVTRDLLAIIIEQSNVPVIVDAGLGAPSHAAAAMEMGADAVLVNTAIAVAGDPVRMARAFAQAVVAGREAYEAGLGAQAQCAEASSPLTAFLDMFSEELAKYDWEETTRQIQHKRPADVETALGKEHLTLDDFMALISPAAAAYLEPMARLSRRYTQERFGKTISMYIPMYITNSCTNSCIYCGFNHHNKFDRVILTMEQIEDECKAIRALGPFENLLLVTGENPRAAGVDYIEQALKVCRPYFNNLTIEVMPLASEDYYRLTQSGLNGVVCFQETYNRANYNIYHPAGMKSKFEWRVNGFDRMGQAGVHKIGMGVLIGLEEWRTDVTMMALHLQYLRKHYWKTRYSVNFPRMCPSEGHFQPNVVMTDRELAQLTFAFRIFDHDVDISFSTREKPSFRNHIATLGATSMSAGSKTDPGGYHTYPQSLEQFSVSDERTPAQVEADIRREGYEVVWKDWDKIFDMEERYARQTMLPEIGEQGQRRLSEASVLIVGIGGLGSAAALYLTGAGVGRIGLADADTVSKSNLQRQVLYTERQIGMPKSAAARERLAALSSHTAFECRPEGITPENARPILDGYDLILDCCDNFPTRYLLDDLCAACRKPWVHGSIGEFYGQVTVFNGRKGRRYRDLYPDRKALCARPRITQGVLGTVPGVIGTLQASEAIKYLCGFGEPLDGRLFTIDLRTLQTQIIDYMGKGFDEYAPAYDAWFLENRNVLYSEINLVAHVLKNPGRTLSVGCGSGLFETILAKEYGITITDGIEPSEGMAEIARKRGMKVTISTAEEADFGCGDYDTILFNGTPSYITDLESVVRKAYDALPEGGRIILIDVPKESTYGVLYNLAKALGTWDHPLLAGTYPENPYPIEFVRVANWRTTAEKIELLEKAGFRDLRFAQTLTTHPLYSNRQEEQPSEGYEKGDYVAVTACKMKKWSEEAWDVARPTYLKIIEHPFVEELARGTLAADKFLFYLRQDSLYLAHYSRVLTHIASRLTEKEHIAAFIRFASDGIEVEEALHGSFLKGDVPAPEEISPTCLLYTSVLQAQATAPVEVEAAAVLPCFWVYQQVGRQIIARQQGSGNPYAQWIETYADPSFTEATSQAIGICDALAEKTGPETRRRMTDIFLRCTKMEWLFWDSAWYLESWKIMKKHYKRVLTIAGSDPSGGAGIQADLKTFSACGCYGMSAIVAVVDENTVGVTGVHPVPVDFVTGQIRSVLDDIGADAVKIGMLHSSELIRAVRETLAAYDIRNIVLDPVMVATSGDRLLQEEAIATLQEELVPFVRVITPNIPEAEILLGRKIAGQEELPQVARELSFGRKVSVLLKAGHLHDTELIDVFYNAETDKATPLRSMRLDTPNTHGTGCTLSSAVAAFLAHGLPLDEAVVCAKEYINAAIIAGAEYEIGKGHGPVHHFFNFWEMSMVFKFRMLSDENDHFVRDYEVPYDMTLLGFHEFITRSLGYEEGMSSFFTADKQWNRLREFTLMDMGDNSEDAPLPMADITLGQLIHNNRDRLIYQFDLMGDRAYYLELTEAKKPEQGMEYPRVAFEHAPAPDQFDPDANESEGSIFEEMMGDFSSFEGDDNYSDDDMTDKRLVVLVGATGSGKTDLSIRLAKHYRAPILSTDSRQVYRGMPIGTAQPTNEQLKAIEHHFIATLDIQQDFNCGQYEVQALELLRQLFVRHDTVIAVGGSGLYVKALCEGMDDLPEADPELRRTLRQRLANEGLESLGEELKRLDPVYYAQVDRSNPARVVRALEVCLQTGRPYSEQRTKPRRERNFRILKIGTDVPRAELYGRIDRRVDEMLAEGLEVEARRLYPYKHLNALQTVGYKELFAYFDGRCSRDEAVELIKRNTRRYAKRQLTWFRRDPEIFWTPPGDTDKIIAYIDGTLMQDLKALEGKSLAELREIGKALGIPHLMMKKKDLIEKILNFTQDGGVADTETQQSPAEAPKKTRRPRIAKTESAQASVEIREQPAAQTTTTPTPAATKESGKRRGRPPRKVQAALSVAATDIPQTELIKIPREEEPVREIHEEQPPLPATRPAEEVITKDDFAGEIAGEGVLEVMPDGYGFLRSADYNYLNSPDDIYVSPSQIKLFGLKAGDTVTGTIRPPKEGEKYFPLVRVTDINGLEPEYIRDRVQFEFMTPLFPSEKFCLTGNGHNNLSCRIVDLFSPIGKGQRALIVAQPKTGKTVLMQSIANAIADNHPEVYMIVLLIDERPEEVTEMARNVKAEVVASTFDEQASRHVKVAEMVLEKAKRMVECGHDVVIFLDSITRLARAYNSVQPASGKVLSGGVDANALHKPKRFFGAARNTEEKGSLTIIATALIDTGSKMDEVIFEEFKGTGNMELQLDRKLANKRIYPAVDVIASGTRREDLLLSREVMNRTWILRKYLSDMTPVEAMEFLQKQMNLTDNNEEFLATMNHMLRTLFISLLCLLGTTRAQAWGPKGHDVVAYIAECNLTPEAAEKIDKILGGASMVYWANWLDSASHTPEYAYTATWHYANVDEGFTYETMTKNPDGDIVEAIDRIVAELKGGQLDPAQEQLYLKMLVHLVGDLHQPMHTGHLSDRGGNSVPVRFFGRESNLHAVWDSSLPEAAHKWSYTEWQNQLDRLTEEEVARIQSGTPLDWFEESNAICREIYVATPEGSDLSYDYIAKYAPVIERQLLRGGHRLAGLLNEIYGMRKFLFFVMAAVLFCGCDKEEGGDNLPCPVTEVSVPASSEENPVSPGSSVTIQGQGFTANSEIWLRAITRAADVQAEVTDVTATTVTFTAPDVSGEQNILLKQDGGEWILGVLHFPEVPNTPGGDEEEPAILPTRISHVRVTWEEDMTFVLRYTYDAEGRIVTITETDQQYNFEGAPDESFEDEVTTIEYAPDRIVVTEPEGAQSIYALADGRTTAITSIPGGGVYLSDYTFSYDENGYIAESTWVENPGGEYSAESVYTVIDGSLVRVQEKESSQEWYGGNAIYENDPVQLNNLNIDLFGMSDFIDETDLDRIYLFGAGGNRFKTLPVKIDYGEDGVTTYRYEMDGEYISRIDKFQENELTSILEIFYEEMPQTNLQIICVLKIQTTTSSVPRQMNDTKKPYLRQLGTQDVFIFMKTPVDIWAELGARLSSFGQDAASREVIARACQKNDWFEPEEIVDAVRSIREEFLSRDKIERWLACYERPATLLSRTVLVVMAGNIPLVGFFDLLCVVTAGHRCLVKMSSKDAMLMSFVIDQLKKIEPDIPVAVYNGATPFDAAIATGSDNANRYFRSLYAGVKTLLRGNRHSVAVLNGRETSGQLEALSDDIFSYSGLGCRNVSLIFVSRGISLRFASRRMNPKYLNNYRQRKALREMCGDPFSDLGFALLIRQSEFSQALSEVSVVEYDDLSQVAAWLREHDAELQCVVSDCIDHSRRVPFGRSQQPTLSDYPDAVDVMEFLYDLMAKINQIRRLAIIVSKLNSKHYVPAEELVDYVSYTIRARYSDTAGCTLRTLQRDFRTIEELFGVTIRHDKLCGYYIDERYGSAEDYEALLLNFELLNAIDSDSTIQKYLLPEHHRAIILPNIAELLDAIRNRHPVEFDYILVRHGGKVVRKCLHPYFLKESQQRWYLIGYDTDDKLKAFGLDRLSSLRILSRERFMRNDTIDIPALFRESYGIWNNPEDPVEEIVLKYDVLDGAFVKTMPIHPTQELLDDSSDGITIRLQLRITNDFVMALLARSRSVEVIRPVSLRQRIYEIYCQALERNKPTCNEMNDRNSFWNESTGERLIGCLGGSIGILSLLCVVSVIVHHCNRPVPTTTAAPWLNDDLSRPVTDIKELDYNRRLIIYRDEEPRRQLQKFEYPKDERIYGESQNLYEDYYEEIYEYFHDMKPYEFEQLVCDHYRQKGYRVQTTSASNDYGIDVFAEKKGEKIAVQVKMYGGSTRKVNRQTMMELYGAAAYFDCTKAVLATDGEVLTDAKEVAHKLGIDILFIQPDRKISMPSASSAEWSLADIIWEKYIMPLAGKTLTRDNGKTNRIVNVDWSGIERITSNGKHQKIGIEIFRFTMDRLFTTGRITRDEINQNYAKRASSGIVLILSQAPCFRLVKQPAALELAEEYPLYSMVLNHLSQVKMTNVSLMGISLLDFVLRKGNYFYQVIGIWKGKYAYLNLVYFDLAYIMDNQTTIGRLFGEDMITFVIPSYQRAYSWRVGKDGRVGQVDMFLNDIIDQPDNSSYFLGHYLFEKTQGNRYELIDGQQRLTTTVIFMSCLVKELRKRKIVRFDYNNMQYATEQIYERYLQPRYGSQKFETVPEDSSFFNRLIIECDSDYRIETGRRSERRIREASSFFEEKMATQTEEGTLFKWFHVIDNAIITTFLLSGESAKLTATQIFAFQNDRGLGLTTLEKLKAFLMHQIYRNNTTNAISNIHSVEAKFASIYNYIERLETKEDSVLGYHCSAFLSSYDSPLDAIKESLLRADDKTQWINSFVSELCCSYSLMCEIENTWHLFNSPIADVCILDKANSMPLVLKLCHYNSNGIDVRNIPAIDNALKLVEKILFKMTYTLGGYRTNNLISIAKKYKPDEYDNLIADLTYKCCHGFKEYWNFNGDCLRYFTANKYHYRRELRYVLYKYENYLRAKARQPLLSPDECTNVFRDVSVSNTLDHITPQTPDFVEYSEEFCNEYLNNIGNLSLLTWGNNSAKKNHNPANDGVVEMYNSIFYSHKEIYETLKSEKKWNEIQISERRDRIVAFIKDNWLDMIERRSAWYDIYDERGKKQKTLSESIGEVLGWAANFFVVRRSAWYDLYDESGKKYKTLSESIGSFVSISGDTFIVRRSAWLDTYDRTGKKINTRSAYMKTVAPQYAQAKRNNILEETDHIGRSQNYGYADKSDRMLDYEIYSECDQINDLIEKRDLATARCKVINLLDRMQQDGNQYNPMVNHFIRVVGLFPYIDKKTASWDDQVVVEAFKADVGDKTPVTLHSAQSRVLKRLLLGENIAVSAPTSFGKSFIIDAFISIRKPDNVVIIVPTIALADETRRRIEHKFSRFYKIITTTDATITERNIFIFPQERSFAYFDKLEKIDMLIVDEFYKASSMFDDSRSSSLLSAMIELGKISRQRYYLAPNIHKISDNVFTEGMQFMRLTDFKTVITKAAHLYKNLPKSADKEQFKKGHLLKILQKKRAKTLIYAGSYKNIDTISNILANDLAVKKTSLLQDFNDWLRVNYGRKFSLCKLSERGIGVHNGKMHRSLSQIQVKLFEQEEGIDTMVSTSSIIEGVNTQAEQVVVWSNKNGSCKFDYFTYRNIIGRAGRMFKYFVGKVYLLEEPPVQENTTLEIDFPEEVVESLDSANPGVEINEEQNDRIKEYESFMIKALGRENFNNIRRLPAFKSCDSKLIKTLVRKLKADPAWPQNYAALAATNTYNWREPIKDVINLLGDKMGGLIKLAIWKMPKNWSHSVAFIYDELEKDGYKISYEDLFAAERYLSYNLCTTLSVINILKKSFDPAAPDISLFIGRASNAFLPKLVYQLEEYGLPRMISRKIQDSGLINLEDDTKEISEIIIQFKTISPKNLISNLKDIMPFDKFIIQYFYVGISMELNIIVAMDILFLLLTVLNIEIVDSSVQMVSLNLFQISLMARSTFKVLFYVNGSKEKNGIVPIMGRVTINGTVAQFSCKQNIPKTLWDVKGNKAKGKSREARDINLALDNIKAQIIKHYQRISDREAFVTAEMVRNAYQGIGSEYETLLKAFDRENEVFKKRVGKDRVMATYRARVRARNHVAAFIKSFYRRSDMSMLELTPDFIKEFAAYLSTEAGLRNGSIWANCMWLKGVVMKAHYNGLIPRNPFIQFHISPNVKEREYLTEDELKAVMTHEFADSKLAYIRDIFIFASFTVLSFVDIQELTNDNIVEVNGEKWILSKRHKTKVAFQVKLLDIPLQIVERYRPMQKDNRIFPDLNYWSICKPLKRMIRECGITKSISFHCSRHGFATLALSKGMPIESVSRVLGHTNIVTTQLYAKITTQKLDNDLTMFGDKLSKTFNGITMSMSMRRNSITVNESGNIIMPENVSNIWMSEPELVELFGVIAPTLRSAIRNIYNSGALKEYEVQKYVRQENGYHADVFSFPMIVALAFRIDSFGAEQVRNAIFKRLYLRKEKTNIFFSLGINGWDMSNYQAMYLYEYVNRCIAIHTYDYDKPEEKSIRMAFLRAFVVCHKAKSKKILREVCVSCMKQGNFENEEFIRVGTTLYKLVNQPRLNGGYVKKRIVWNNETLRQDYGKDYLATVPKYDGFCTVPDHVDYRPVVDKFLNLYEPIGHRPQQGEFPCIRSLVRHIFGEQYELGMDYLQLLYLQPVQKLPILLLVSEERNTGKSTFLNFLKAVFQNNVTFNTNEDFRSQFNSDWAGKLLIVVDEVLLNRREDSERLKNLSTTLSYKVEAKGKDRDEIAFFAKFVLCSNNEYLPVIIDAGETRYWVRKIDRLQSDDTDFLQKLKAEIPAFLYYLQYRQLSTEKESRMWFAPSLLHTEALQKIIRSNRNRLEIEMCELILDIMESVGTDTFSFCHNDILLLLVHSQVKVEKHQVRKVLQECWKLTPASNGLTYTTYQFNYNRECRYEPIKRVGRFYTVTREQLESLMNIQEAKQIKIADYLQSLGYSPVKQQGNCLWYKSPFRQETEASFKVNTDRNLWFDYDAPIDMQVRFGGRYGKTYCRKAVRRSVPSLPLGKGGGTIELASHLYATDHIPYILERIAEQTPHIRPDSFSFGKQSSSEPRFQQLEIVPLSSPALLSYLQERGINTELAKRECREAHFTNNGKRYFAIAFPNISGGYEIRNRYFKGCIAPKEISHIRQAGKARETCYVFEGFMDYLSFLTLRLENCPKFPELDRQDYMVLNSVSNVSKALYPLGSYERIHCFFDNDRAGMEALRQIRMEYGRDLYIRDASQTYSGCKDLNEYLQKQAERNRQVQSVRETHTQPPKKKNGFRLMATKSSIHIKPCNIASSEAHNRRTAEYIRNIGESRIYVVSKLSTNNEQWVNPDFGTTELRTHYDNIKRMVKEKTGRAMQEKERERKGKNGKIIKVAGCSPIREGVLLIRADTTLADVHKFGEECKQRWGITPLQIFLHKDEGHWLSGQPEAEDRESFQIDGKWFKPNYHAHIVFDWMNHDTGKSCKLNDEDMTEMQSLASDILLMERGQSKTETGKEHLERNDFIIKKQKAELQRIEETQRHKKQQVTLAEQELKQVKSEIRTDKLKSAATDAATAIASGVGSLFGSGKLKDLEQTNENLRHEIAKRDKGIDELKAKMQQMQEQHGKQIRNLQGIHNQELEIKDKEISRLNTILEKAFNWFPLLKEMLRMEKFCYAIGFTKDMVNNLLTKKEAIRCNGKIYSEEHRRKFDIKNDIFKIEKSSVDNNKLVLTINRQPIGEWFKEQWEKLRQGLRQSAEEPRKSRGFKLMGEKENDMEQKFCQSCGMPLTNEILGTNTDGTLNEDYCIYCYKDGKFAQDMTMEQMIDHCAQFTDEINKQSGQNLTQEQAKDMMRQFFPHLKRWKNRLVMFIAILTYKKPLSEVDNYLSAHREYLAKHYAIGDFITSGPQIPRIGGVIMIKANNREAVDAIISEDPFHINDIANYQIVEFTPTMFCNEELKTILMMRLSLRPYQPTDANVITTWLKNEYLMRQWCADRYECYPVTPEDMNIYHERYIDGQSQRALTMLNGNNIVGYITLRTPADDSSEQRLGFVIVDDSKRGQGFGKTLVSMAVKYAFETLGATKVSLGVFENNPSAIHCYKSAGFRRVIVPTTESYSCLGETWNCIEMEQYKGLMKVIGINGSSRKDGNTAIIIRTIFEELNKRGIETEFIQLADVDIEPCRACFACKGKGNCVFRKDGFAEVFSKIVGADGIILGSPVYSADVSSRMKALLDRGGVVAAVNPGILKHKLGVAVAAVRRAGGMTAVDTMNHFFLNKEMIVAGSTYWNMVYGREIGDVLKDNEGIANMRNLGQNMASILFKLNMIEIKNLEGISFEQIYTAFKSAFSDYEISVDKTELKSMLKRRGFNPALSFGAFYDDNIVAFTFNGIGKYYNGKLTAYDTGTGTRKEFRGQGLAKRIFTHSMPFLKNAGIENYLLEVLQHNKRALKIYESLGFEILREFNFFTQKKQLVVNHLSDKPAKCSIVALKSEDILSAQSFHDFTPSWQNDIESIKRAGDDLVTLGAMVDSVLSGYCVFSPKSGDITQIAVDPTFRRKGVASSLLKQMIEMTESEIVKVINVESPTPSLDAFLASKGVCLAGKQFEMVLTLMTPKEVLEKWIDCFNASDVEGIAALYADDAVNHQVANAPVAGKEAIRRMFAGEFATAKMVCIVENIFEDGEWAILEWKDPLGLRGCGFFHIKNNLIVYQRGYWDKLSFLKQHNLPIEMPYISVESGALTAEQKKELIERLTATAAEIIHIPAQFFTVTIKELPDENFGIGGKSIDEIKRNYKSMKFENKNYIYWLCATIIVMFMLPFVEAQLASECSGMVLCMILFHDFIRMRILFFFAYNQYSMVMKKYELKNNKALGRYEFDLGGATAAVDYEECGPGCIAVTHTGVPDRFCGQGIASQLTVAVLEDLKRQGLKVVPLCRFMARYILRHPEWKQMVADKMVSYKELGLVNTREMFAKAIKGGYAIPAFNFNNMEQMQAIVQACVETSSPVIMQVSSGARKYANPTILRYMAQGAVEYAKELGKNIPIVLHLDHGDTFELCKDCVDMGFSSVMIDGSHLPYDENVALTKKVVEYAHKHDVTVEGELGVLAGVEDEVSAEHHTYTRPEDVEDFVKKTGVDSLAISIGTSHGANKFKPEQCTRNADGVLVPPELRFDILEEIEKRIPGFPIVLHGSSSVPQEYVHIINTHGGALKDAIGIPEEQLRRAAKSAVCKINIDSDSRLAMTAAVRLVLTDKPAEFDPRKYLGPAREEMKKLYMHKCEKVLGSAGKAMSEFIYQEPFPIECDKTQYRLLTKEYVKIVECDGRRILKVDPKGIELLAREAYTDVSFYLRPAHLEQLRHILEDPEASDNDKFVAYTMLLNQTVAAEGELPTCQDTGTAICIGKKGENVFTGADDAECIARGAYEAYKERNLRYSQVVPFTMTEEKNSGTNLPAQIDLYADKGNEYKFLFITKGGGSANKTFLYQQTKALLNEKSLLEFFRSKLMDLGTSACPPYHLAVCIGGTSAEMCLATVKKASAGYLDQLPTSGNEGGRCFRDLEWEQKILQICRESGIGAQFGGKYLVHDVRVIRAPRHAASCPVGIGVSCSADRNIKAKITEEGIFLEQLEKNPARFLPKEAPAMSPAVDIDLDQGMDKVREILSKYPIKTRLNLRGTLIVARDIAHARIKQMLDEGKPMPEYFKKHPIYYAGPAKTPKGMPSGSFGPTTAGRMDPYVDLFQEHGGSLIMLAKGNRSQQVTDACRKHGGFYLGSIGGPAAVLAKDSIKSVEVVDFPELGMEAVRKIYVENFPAFILVDDKGNDFFAQLKHMKGFFCKITLALCFVIFVGSAARADEVTFSANAPMVVTAGESFRVEFSLNATPDDDSFEAPDFGAFDVLAGPAISQGHSIQIINGAMTKNVNYTITYVLLAQDAGNITIGPASIKVDKKRYKTQPLPIEISDKPSAGSARAPQGNSDSSDESIEEEAQGQIAKDDLLLRVHISKQSVFKGEPLLATFKLYRRVAIVGYEDIKFPSFNGFWTQDIDVSNAMWQRETLNGKVYESTVVKECLLYPQQAGTLVIEPATITAIAQVIVQSRRNIDPFFGGGHEVYNLRRKLQTPRVNITVKELPAGAPASFTGAVGKFSMDASLSADQLAANSAGTFTVKITGQGNLPFIQAPKLTLPASFEQYNVKTTESIQTATAGTSGYRQFEYPFIARAEGTYRIDSILFTYFNPDRREYVTLSSQSFPLQITPDANGGESYMVKGLSKEDVQMLGQDIRFIRLGKAHLQPMHEPFFLSGLYIGLLAAILVLFAGTYIALRKQIRDSQNAALIRGRRANKVAIQRFRIAKNYMEEHNQHAFYEEMLKALWGYMSDKFNIPVANLTKENVREELHKRGAAPEDTQLFSELITRCDEAQYSPVASARMSDVYRDGLELISRIESIIKRQKPMKRYILFLLATLLSAAVPGQTAARTDSLAQHPQSEQTASAAYASDPDKLWDQANTAYINNDFPTAISLYETILSSGRQSGKLYYNLANAYFKEQEIGRAILNYNRALRLNPGNEDIRYNLQVAEKMTKDHIDAVPEFFVKTWLSNLRNLLSSTTWAVLSLVFLAAMLGSALFYLLSRRLVRRKIGFYGTATAFLLLVLTLCFAAIDRREAIDRTSAVVLRDAVAVKSSPDQNSTDLFILHEGTKVEISDRLNGWCEITIADGKKGWMECSTFETIMSRLLQDVTGELSKLPGIGRRTALRLAIHLLRMEPDSVSNMTRSIDRFRRDIKYCKLCNNLSDEEICPICADRERDHTTVCVVEQVADVLSIENTRQYRGLYHVLGGVISPMQGIAPSDLKIDLLIERIAQGTIREVILAISTSVEGETTLFYLLNRLRQYPQVKVTSIARGIGFGDELEYVDELTITHALMNRREIEMRYTLVMTRVKIEYMLFAAMSLVAGAAYGRGPVVAAVGSGPWANPDLYVGEWYEIARFDHPFQEGTVGSRVVYRLLSESKMRIVYRGKDGRTGRDRISSAKGRLSADYECLRVSSCWFFYSDYTMSACDSAAERQWVVVSGRSAKYLWILARRPRLSTQVLVRILDQVEKQGFDTDKLHFVDQRMMHSEYKWLDRIDSPDDLKKLSGSDLRQYCDELRQYIIEQCSSNPGHLASSLGAVELAVALHYVFNTPDDKIVWDVGHQTYAHKIITGRREAFRTNRKLGGISGFPRMSESPYDAFGGGHASVSISAAFGMAKAAELKGEQRQVVAVIGDGSMTGGLAFEGLNNAGASKQTNLLVILNDNNMAIDQATGALKNYLVKISTSRRYNAIKRRLWRILSHTPAVLRFCQKAGNAVKQGLLKNSNLFESLNFRYFGPIDGHNLPELVRALAALRRIEGPKLLHVMTVKGKGYKPAECNKPVWHAPGKFNPETGERIVSKTEVARYQDVFGQTLLDLARADERIVGITPAMPSGSSMNILMKEMPERCFDVGIAEGHAVTFSAGLAAAGMVPFCNIYSSFMQRAYDNVIHDVAIQRLPVVMCLDRGGLVGEDGATHHGAFDLAYFGTVPNLTVAAPMNELELRNMMFTALEAGRPFAIRYPRGNGAGVAWRDEPFAAMEIGRGRCLKDGERIAVLTIGTVGNFASEAIARMEADGIRVAHYDLRFAKPLDQELLHEVGRKFRCVVTVEDGALRGGVGEAVVAFFCEHGYLPKVVNLGIPDRFVEHGTPAQLYAQCGYDAEGIYRTLKSLQESLQMKYDRILLKLSGESLQGIQKYGLSTDVLHSYAEQIKAVVRTGVQVGIVIGGGNIFRGLQGARKGFDRVKGDQMGMLATIINSLALQSALEDNGVKAKVLTSIRMEPIGEYYSKAKALEYLEAGYVVIIGGGTSNPYFSTDSASALRGIELEADVMLKGTRVDGVYTADPEKDPAAEKFDEITFDEVYRRNLKVMDMTAFTLCRENGLRVIVFDMDTPGNLEKVLAGEKIGTLVKLMTERKKPNNKRLILMIVLLAVVIALMWLLPDGSQPAAPATNAPKTEQTKNTNDAPDDIEATTLVKAGTQAPDFRVEMFDGTTFTLGSLRGKVVLLNFWATWCGPCREELSRVQKDIIDRFKGNEDFVFLPVSRGETRETVAAFREKMGYTFPMGLDPEQKIYRLYASNYIPRNFLIGKDGKVISATIGYEAPEFDELILLIERQLNSANMDTKTILSEASDRMQKTIEHLEEELLNIRAGKASPTVLNGVFVDYYGSQTPISGVASVTVPDAKTILIQPWDKNLIRAIEKAIIDSNIGLTPSNNGEQIRLSIPPLTEERRKELVKQVRQEAETARISLRNARRDAVEAFKKAQKEGMSEDEAKDGETQAQKLLDKFTKSLDAILDNKEKEIMTVMIDRYLERGEMFVARDDGQVVAECVVTDEADRIGEIKNLAVPLQYQRKGYGRQTLEFLEAYYRGRYRTLLVGTGDVPRTLRFYERCGYVRSHLIPGFFTDHYDHPIIEDGRQLVDMVYLKKSLMKLILKISLACLLATGCASKISAQTYVKLNGLYALVGVVNPAVEFTLSPKSTFQTEIVVSPWKSINNHHALFCIFMGEYRRYFKEHNRGWYLGANIGMQAFDLSKPYIENWKLKFENRYSKGYGFMIGLCVGYEHIFRERWVLDAYLGWSWMSSFYNGYSMDGKIDMDPGHQVEPQYPDPFNGSSEWYPNKIGLSIGYRIFNPHKKKMKKILFTLFALVLASGIAAQIPEPDFIGEVLAIHSDGTAEKLEKHNVKMRTGAGVYIAGLAVNKSKTKILVAGSQANVRFAADEPVNLIVRAVDNKTDPMSIVRVFAMKNNRKQRSAVISAVGSFNVTSNDMEYLPFTAEKYGENSYYLTFGDAPAGEYGIIVTNPNNVDEKMIIVSAFGIDPEKMPAASGSETAEDTEMQIVEIHAREILDSRGNPTIEVEVRTVSGAFGRAAVPSGASTGEHEALELRDGDKSRYSGKGVEKAVENVNNIIAPAIVGMSVTDQVGIDKTMIALDGTPTKSKLGANAILGVSLAVARAAADYFGLPLYRYIGGVNAKTLPVPMMNIINGGSHSDAPIAFQEFMIRPVGAPSFREGLRMGAEVFHSLKKVLHNRGLSTAVGDEGGFAPALKGTEDAIESILEAIKAAGYKPGRKSEGGDVSIAMDCASSEFYADGVYDYTKFEGANGAKRSSKEQVEYLKSLVAKYPIDSIEDGMSENDWTGWQMLTAELGDKCQLVGDDLFVTNVDFLRKGIEMGCANSILIKVNQIGTLTETLDAIEMAHRAGYTSVTSHRSGETEDSTIADIAVATNAGQIKTGSMSRSDRMAKYNQLLRIEEELGDEAIYGYTKVYRKMDLYNLHSCNFLNFIKNNFVFNGRFTGAASACNLGCLPDRTHRTHEKSQRGGSEFRTAAAQSVEPCKDNDFYRQTVIRITLFLPSKSVIRNGKSDAKNLFYQRKTFFITDIFLSSVMKKLLLCLLAITAAISTAWAQTPKKNIFGLRVGMDMSKISILDTGSGEKYLSELRTSFNIGLTDQVRLLNDKPFYFQFGLMLHNKGGKVQATDGGSDIELSLNAMYLELPVMLNYHIRLAPKVAVIPFAGFYGSLGVDGKQSFDDLGLEIQQNLFGKNKMFQRGDFGGRIGIGLSIHSVYIGASYGGGFLNIAQEDDTSKFRNRSWSLSVGYDFMSRNPLRELRGDPGGESGGVVSADSREARTGSTTIVDTSESWDGTALPSYPAGTPRITILRITIAPGERLAMHRHPVINAGVVLQGELTVVAENGLSKTFSAGSGIVELVNTFHYGENQGTVPVDLVMFYAGGADLPLSVKRMKRILIVGAGGQIGSELTTYLRKIYGNDNVVATDVRECKQLAESGPFEVMNALDANAMAEMVSRQKIDSIFNLVALLSAVGEAKPQTAWQVNIGALMNSLEVARQYNCALFTPSSIGAFGPSSPKDKTPQDTVMRPTTMYGVCKVTGEMLGDYYHSRFGVDTRSVRFPGLISNVTLPGGGTTDYAVEIYYEAIRSGRFTCPVPGDVYMDMMYMPDALRACVELMEADPTKLVHRNSFNIASMSFTPEIIYAEIKKRLPDFTMDYDVDPVKKAIAESWPNSLDDTCAREEWGWKPEWDLSSMTDDMLEVIRKKNLKMEGADVRWSANDALGIFSGTKFVNAKFTTKDDNAASATFTGDATDAEGTEAAKAFAYYPYAAGATLEGTTVSGLEIPAVQTFAEGTFATTLNPMAAVGEDHTSLAFRSVGAVLRFKLTGTDTFNKLILTGNNDESIAGAYALDFSGEVPAMTFSGEGKSITVTCASDVTLKTDVATEVHFVVPAGIEFTKGVSLKIVHSYYSWDAGDVNKEILTRKFTTPLTTAANKLYNVTEFKAEDLSSGMDTNLRAYLLSEYDANGDGLLSQAEAESVTEIYSTGFGGKVKSLMYIERFPNLEVLVVNSNCDELNGITLSNNKKLTRVSLSPANGLWSSLNVSGLENLTTFELKFSNDQANLSKINLSNCPALKKVVVEGAKSLETLDLTGSASTVEMFWLQSCPKMTTVDIHEMPITTFASADYASSGTNMFADGTMIIATLAQKSAMASQYSDYGVSVTWWCVDEERTEAAASMNAVLRKAILDDETVNPVGDINTVITEEMLAKVTEINITTSMDATGLTLDGLDLCTNLTKLSINAWQVSLGDIDLSAFTKLTDVTMSPTAGYTSIQLPDGIKSFKSIIKYANHEPVGPTTLDLTQYTDLEYVSVMDSYGEPAALKSLNVSGLSKLALLYVGGTAEVNIANCPLLTTCIQNYGTYESGFYWSGYDSQTIIVESEAKRDQLKTSWKEVMGYGEENPANAWTIQMKRFLACFGCAAVLAASVSCTKDTTVAPEVKQGAMKSPLRMEKLNVAERRTYVAPELSIAEFAIENGFGNSVASFEEETYEMLYGSTAFLCLQRGKVVRISYGVCIEREAVKGLASFLSSENRIFGNDFMKNRNFKIGALLVSLFAASCSPALYQSGTYNIDDMYAEHDVTRIAQEKQAIAEARKAEAEAHRAEIEARQAEAAYYASDDSYQGVLADTYESAYARRLRGFSSPTYQMPTSYFNLRYNGTYQFVSAYDPAVYNIIVMGDEVWVEPKYITSMFGTWGSPSIVSFGWSAGLYNDWYFSWGYNPYPWAYPGFGWPYYSYNPYWGYPYWGGYYPYWGYYPGWGGGHHHHPYPPHHRPNVVHRSTYRYGSGAGSNIGSTSFGGRGQGSLNNGYRNGTTVGSGSFRGGRTNSNSSSSFRGGSSSVNRGSSTYRNPSFGGSSSSYRGSSSTPNRGTYTPAPSQPNRGSSGSFVGGGGGVRGGNSSGRNSYGRMKHLGILALLSAALFATAPASAQSSGGLLMDRDIVTPSDLFELSQTTFSLGTARSMAMAGAFTSLGADLTSMAINPAGLGMYRRNEISITPLMSFARAENNAPTFNSNSKNRFSIGNFGFTANVYEGSGPLVSVNIGFGYNRLQDLNYQYSYYTQGNVSSIADVFSDMLQYSGINRDQITGGFNWSNFNPRLWGSILGYKAGFTDQIGGRWQPTWIGNNVDIGNYTTVVSNGSIGEYDISAGFNLNNKFYIGATFGIQSLYQRKTYYYGEDYVYPGNGTDPNLDYQLLYSNFNQEVILDGAGVNFKLGMIYRPIQNLRIGFAFHTPTYYWIDRTYQAYTDSGVHVNNPNDPDGLKPGPDGNQYTDALSPVLEDTGGYNWEFTTPARLMFGISYAFGNRGLISVDYERDWYNGMRMKNNPAGGDNEIYNDTFRSWYKGANIVRIGAEFKPLPFLAIRGGFGYMGSMLQDEEQVSAAPMTKQMLYYSAGLGFLLSPGVALDLAYNYSSTEQTDYNLYYFESPSGINGSGIYNTKLKRHFAALSLSFRFMAKELKDVTKAEDNYSQWYNDLVVKAGLAENSAVRGCMVIKPYGYAIWEKMQAALDKMFKDTGHQNAYFPLFIPKSFFSKEADHVEGFAKECAVVTHYRLKNDPEGKGVVVDPDAKLEEELIVRPTSETIIWNTYKGWIQSYRDLPILCNQWANVVRWEMRTRLFLRTAEFLWQEGHTAHATKEEAIEEATRMIHVYQKFVEEWMGVPVIVGHKSPNERFAGAVDTLTIEALMQDGKALQSGTSHFLGQNFAKAFDVQYINKEGKLEYVWATSWGVSTRLMGALIMAHSDNNGLVLPPKLAPIQVVLIPIYKGEEQMRQIVERLRTIAEELKSKGLSVKIDDRDNVRSGFKFAEYELKGVPVRLALGPRDLENGTIELVRRDTLEKETVPQEGLTDRVAALMDEIQQNIFRKALDYRNSMITKVDTWDEFVDVLENKGGFISAHWDGTVETEVAIKDATKATIRCIPMDAVEEEGKCVFSGKPSHRRVLFARSYMNYQNDSVRRQDRLLDQPEATELLRRGEYGILCMQRPEGGGYGVPLNYVWDEADAIYIHCAPEGRKLHCLRECDRVTFCIVGKTQVLPARFTTFYESILLDCRARTGLTAEERRRALNHLIGKYSPEYKTIGRQYVEKSFHRTEIIRLDILSWSGKCKDNLHPGATPPGANSNRTMNQPTERTRKIYRATWIGMVVNIALSLLKLAAGILGRSGAMIADAVHSISDLATDVIVLIFARISSKPEDAGHNYGHGKYETLASILISLTLIAVGGGILADSIRNIRLVLTGEIIGRPGAIALIAAAISIVAKEVLYRYTVRVGRQTDSPSVVANAWHHRSDALSSIGTLTGIGLAYFLGDKWRIADPLAALVVSVFIFKIAFDLLRSGLGELLEHALPAATEQEILNILTHSKEVTEPHHLRTRRIGATVAIEAHIRVDPRMSVLRSHQLTVDIERRLKERFGPNTLISIHVEPIETEKLSSSDSEKDKNIMNIQVLSDQHLLNNYRSGDQSAISKLIERHKRRVRDYIYMMVKDNDVADDIFQETFIKVIRVIDEGRYTDNGKFLSWVLRIAHNQVIDHFRACKQNKQVNESESGYNVLGSLRFAEKTIEDELISSQIESDVRNLIELLPEEQREVVMMRYYSGMSFKEIAEQTGVSINTALGRMRYALINLRRMIREKELILSMIENDKTDTSRSISDEELMKNEVIGDDADLYYLDCYLSDILGKGMKRVILLFLVFAGLTFGSCRRQTVMPQFDIVVTDTVAVRGGIPCRFQYAFTSIANADEAPALQAIQESNMLYFFGLEHFQGGVQEAVDWSIGQFMDEYIGTLDESVPQWETEMEMAVESEARVVDTLLVYTISSSNYTGGAHGMYSINCHNYSIAGGYELALSDLFDAARQEALIGLIRNKLYEQFGVTGDEGLVAQGFFPEYISTTENFEVTEDGITFYYNPYDIGCYALGGVEVHITREEMQGLMPIGFRNVFNFGDFWAGVVGEGRQGVLLLYRESLPCVEINGLCIAPLRIRFESGFPVFVPEPWSAKMPTVSVIVPNYCHAPYLEQRIESILQQTFQDFELILLDDCSTDGSREILERYRNHPKVSGIFYNERNSGSPFKQWKKGLSKATGDYVWIAESDDFSSPCFLERCVRILDTRPDCSIVFTSSYIVDSHSRTIREEAPVKYPKHKQIRFGSRFFLYRFLCPRNTIYNAGMALVRRSALPADDNYTQYRYCGDWLFWIQIVSGGGNVVYLAEPLNYYRVHDSNTTAESIVTGRKHIETLRILEETFRLIDPPLICRLSIAGKHLLRIRKAAGSHWNEEPYLSVRLAWRERYRHPRMIMFWHKVFKDLPRSFSRMLITVIVPIYNMEAYLCTSLDRLLQQSFQDYEILLIDDGSKDSSGEICDRYAREHSRIRVVHKPNGGLSTARNAGIEHARGEYLTFCDPDDWVDADYLQQFVEAGMDEHTLPVTGILQHREGKSDRRLTAPAMDVQGQACTEAIVALRRHDMLGFTVNKLLVKRIIDENGLRFIEGLSHREDEIFLLQYIPHVSRIVINEKTPYHYRVLGSGLSKKRKPTELILRVSRQLHDLFLQAAPTPEGRYVAARIRLQQCCEAVAASKTNEELHIAAKAARNARKEYLSTFDPAFLTDRRDRKVAARSRWVFALGALSGRLLRRLTRLIHIMSKYDYLIVGAGLFGAVAAYRAARSGKKALVIDRRPHTGGNAYCEEREGIRVHKYGAHIFHTSNREVWEFVNRFVEFNNYINSPVANYKGKLYNLPFNMNTFYAMWGVTTPAQAAEMIDRQRHEAGISEPRNLEEQAISLVGIDIYERLVKGYTEKQWGRDATQLPAFIIKRLPVRFTFDNNYFNDRWQGIPIGGYNKLVDGLLAGVEVRCDTDFFADRTHWESLCDRIVFTGRIDEYYDFRLGELEYRSLRFEHETLDTPNYQGVAVMNFTEREIPYTRIIEHKHFEPGGDQPRTIITREYPAPYEHGAEPYYPVNDQRNTKLYESYKALADRDRKVIFGGRLGEYRYYDMDKVIESALKLTLMSKTVILVCAHKQDACLKTPPYQPVQVGRAISQTELPFAVGDDTGDNISDRNRHYCELTAHYWAWKNLHDADYIGLNHYRRYFDFEGGSACSLRTVRSEAFFSASHPVPDFDRLFSRCDIVMARPKIYPYNLYTDYCKCHIESDLLTARQVIAEKYPAYLPDFDRVFFRNNRLSHFNMFVLPRERFEAYSAWLFDILFEVERRIEIQDDPVQGRVMGYLSERLLSVWVRHNRLKICYKTVLMVNDQKRKGLGKHLFHTTVNTLAYWITYPLRRRSPRRAAEMDKKEVVVVVPVYRPELTVWERASLRQTVGVLQENYPVELLVPCGMDCSAIRREFSGLPVREVSDEWLGRKNGIAGYNRMMLSAGFYELFRDYEYLLICHTDAWIFRDELADWCRRGYDCVAAPWVRRKVYDLPILKQYLRWRLRRAERAGRMIRQSLYGKIGNGGLSLRRVESFRAACEKYGDEIERFCSMGNHLGNEDVFWAVVPEGFRYPSQEEALRFAFDTNPRYCYRLCGSRLPMGCHSWSKPRMWRFWQQIIPLPDAASGAAADKMPYKLTLVLTPKQAADVKYYTEQAARRAGVAEQDVALVRVVGRSIDARQRQPKVNLTLEVYADCEPQPAPVHFDYPSVAGRTEVVIVGSGPAGLFTALRLIERGYRPVILERGRDVSARKRDIAQINRNGAVDPDSNYAFGEGGAGTFSDGKLFTRSKKRGDYNKALQTLVFHGATPEILYESHPHIGTDKLPRVISNIRRTILEAGGSFVFDARVTDVELHDDRVKGVWVGDTLYEGAAVVLATGHSARDIYELLHRRGVRLEAKPFAMGVRIEHPQALIDSIQYHCESRGEYLPAASYSLVSQEGGRGVYSFCMCPGGFIVPAMTDAAESVVNGMSPSGRNSVFANSGLVTEVRLADFEHLRAEWGELAGLKFQQQFERLARQYGGEHQIAPAQRVADFVAGRASGSLPRTSYIPGVVPSRLDKWMPGFIASSLRAGIATFGRRMRGFLTNEALVVGVESRTSTPVRIPRDAQTLMHPEVAGLFPAGEGAGYAGGIISAALDGERIADAVVNYLKKMIVYHRFAKVSANSLNRKPKAFRSKLAGARKGAEAKNGLRDGICSRVRLQCTVSLRFTSMRQETFAILFLMRKGRPKKNGLAPIFARITTGGLRQEVYTQCDSNPETWNQHKERAMGTNKLAIQVNERLNDFRVKIIDIRTKLLAEGYAANAAQIKQRYLNPTCNTMMLIAGLADYAKRRQGEVGVRITQRTADKYERLLRYLKQYLAQRGKAEDIPVERMNYEFLDGFNLFLQTAHRCRHNGAVAVMDCLRNFVLYCLRNEWITKNPFRYYKLKEDEVQAKEHLTAHELELLTRKELDHRLARIRDVFVFCCLTGLAFADADHLRREHLSQDDEGRWWIHKPREKTSVMSRIPLLPASLEILRRYERDEACLARGRVLPTPSNQKMNAYMKEIAAVCGIDKVLTTHVARHSFATVLKRSGVSTSIISESLGHSSEKITQIYLDSFENSQIDAAMQNLLMQEEQTFYPVTTEYFTACLPLLEKYFGITAGYFNKELSNAKCLIPHREGNIVKYSIKEDCNLVLPFRHLECHDLLSLINSYGTITPIIEEALLLVAYCIREQQIDENEYNDLVQFHTWDIYQSEWAHLLLFMEQMEARTLKSNKQTAITIRTNNGEAEQISIPNSNNWLFRLIKKELASYFPEVQTAEEARQDIQRRKPSAGREKKNAIYSAVAYGIYRMLHEENAIPSQPNMPNELCQLIHDYTRVTGCYPNNKGESGKYDPKVIRADLAAYLKRAAMNQAPRFRPIPLQRQVIMQDFDFPLLDMKTLANINDNINIKFNKTMTTISENAESQQVAGNRAEEMMASAIAHEAKMAEIKAAEEQEEKMNLRIIKIKPAGNAKMFRTLAKAIAAGATTLIVTTRVDVAGCGYVWFGIRKGYTELDGKLLLNAQIWNYLMAFLMGKELPEVTEFEPDREICCQSEWLAEVAAEVEKLTPITSEEYNESEEGIGYLAKKYHFSNGKVVMPAEAMEDITDLLNMKIEYITIDAGQRFDAVMPEIPTNSIINKTVTGCGATYAEINAPRHSVIIEPNVPVIEGKMKKHPQILGVFEGVTTEDIIDFLNTNYNDGYLKIMTTPESFPKVRSAMVQTHTDMHGEWFMLFDECERTIQDAGYRGSITLPMDDFFRCKQKAMVSATPIIPSDPRFEQQGFTMKILRPTYDHKPKMLLIHTNNTVGWVRTLMGQVKGKGHPLCIFLNSTDTIHRMICTYKIEKRCKVFCSYESVKKLRKRDFSRAYSSLEELDEINFFTSRFFSAVDIELPTTACVLIVTDLSFAAHTVIDPTTEAVQIVGRFRNGVEDAAHIFSTNKEMPCKSREEIATRLEECEAVYKQVLQIEASGAGCDTRAQALEGMDYKRFMNADGTRNWFMWDNAYDDERIKQYYTDAELVREEYAKAFHTDCAEHIYPLSDCDRLQRINPRLKMKDLFREIVRQLEILEQNRTWNEYYFLREEIQSQVPMMVDAYYALGAAEIERHNYNMNAISKQIQENESQQLLTSEKVCGEVYDRLKTGDKLPVCAVNRFMNDLIMRFGIPYRKKVTAKMIGIYFEYRDVRTNKQRFIELGKRIIMSYKPPYTITPKITNLVAQISEAIGSYYAHENLRLHRVNRIKTIHGTLAIEGNTLSTEQVTAVLEGKPVVAPINEVQEVRNALKAYELLDTLDPCKVDDLLKAHATMEAGLIDEIGCFRKGGAGVVSGKTVIHYAPDAERVPFLVNDLFEWLRTTDEHPLIASCVFHYEFEFIHPFADGNGRTGRLWQTLILSRWRPIFKNLPIENIVYKYQKEYYKAIAVSGGKAGCTPFVEFILGVIAETLTTQEITRKTTQEIILEAIARNPSITRAELAEVVGISPDGVKYHLQKLTKSGRLKRVGSTRRGEWVIGMKNRDCPLGRGISVCLSASDNLFRKGYFIDPFTKFVTFLLRGSFGINRTIWGVDDKMQVRFGGRYGKTYCRKAVRRSVPSLRTGEGGSIIDLVPRMEGCAEGEAVMVSYLTGRGIDPAIARTYCREVRYTIGGKEYFAVGFRNDAGGWELRSARFKGGSSPKHITTLDNGSDMAMAFEGFIDFLSYLSLKGTRYRRLTASCSTRWMLNSVVNLHKAVSFFSRHRVVHALLDNDDAGQKALARLGESLPSSEVIDQSVFYRDHKYLNEYLQEKQHQQVQRKQQPHGHKVRMSGAHNRRLAEYLANIRKGKIYIRTDLMAKNEEWVSPELGDTSLEERTGMQTKDRERVNKKTGKVTVVRDSTPIKKGVVVVKEDTAMKQLQRFCDVCKVRWGITPLQIFIYRDEGHYEMPDDETSWKPNYHTHIVWDRMNHNTGKSCKLLPQDMSEMQTIWAEALGMERGTSKVQTGREHLERTDYIIAKQKQEAEKTRIAKEQAEAELKAVKGELRTEKLKNSTAEVGTTILDGIGSRIGTSKVKRQQQQIDDLTQKNERLHSEIRRLNKTIDRERREHEQTAKRLQGEIDRIYGWFPDTPQLIRRGEYCREIGFTDKMACDLVNMLPVHFSGKLYSSEHSQHFENEHSEARLLRDEKGPGGFQLVIDLIPILQWFRQKAEEFLERLGIEIKDREQGRGMWMRMLFVHPFACENCQIFYQGQCENTFSMSAERITTLDVAKIENNSQMNNHSFGVLPIMKKFLFFLAVTACLVTTGCSDEYDDSVLTERIEALENRMKELEELCKRLNENDYITSVEPVIENRKTVGYELSFGKSDPITIYHGKDGADSAITEVTQDEQNVYLTLQDGTVITLPKKESSGGSGDGDNSGEGSDSGDDGDNGDGGEEADPTKASVEVPKAGGLDLALEDADLLRIETLRVSGFLNDDDIRFIYRNLPRVACLDLSQAKMEVWESAIFDEKTSLKHISLPQVAEVMSMACYGCSALEEVVIPEGTTKIGGQAFYECRALTDVYCRAGVPPLLGIQVFEGTSIKNLYVPEGSADAYREAEGWSLFEHIEEREFMKHSKLFIFAIMTTLAVSGCKHQAATYPTDTLTTKNGSQLTITFFKHASLAIETEGRHIYIDPISQYADYASLPKADLILITHSHYDHLDSAAVAALSTAATTVVCDRTSSETLGGKCLTMKPGDTLAPRDYLSIEAVPAYNTSEDRQQFHPREREDCGYVLTIGGTRIYIAGDGENTPEMKALHGIDIAFLPVNQPYTMTVDQAVDAVKAIRPAIFYPYHYGEVEEKTDIDRLSRELTDITEIRIRPMEMESLKELYKIGTGPSSSHTMGPKKAAEAFVKRASDADRYKVTLYGSLAATGKGHMTDVAILSVLEPVAPTEIVWRPDISLPFHPNGMRFEAFKAGKPVDEWVIYSVGGGALANEETAKNPPANIYPMTHISEILEWCNREGQTFWEYVEECEGPGIWDYLDEIWTAMCETIVRGLTAEGVLPGGLKVSRKASTYLVKAESYTDTLRSRAKLYAYALATAEENASGGTVVTAPTCGSSAVMPAVLYHLVNTRNFSRLRILRALATGGLFGNVAKTNSSISGAEVGCQGEVGVACAMAAAAACQLFGGTPSQIEYAAEMGLEHHLGLTCDPVCGLVQIPCIERNAVAAARALDANSYANLSDGHHMISYDRVVEVMKETGKDIPSLYRETSEGGLARNYTQKMICVGLLMSSCASIFCGSKAKVTFDGEISEEATLTIDGLKHTNVTFPYTTKIRRGFDETVVKIESPNYTASPIIINKNFNAVSVINLLDVLGWGIDAATGAITKPEFKFYQIDFQPKEAKTKASSVDMPRSVNAVASRARRKKVLKLAKGNFGSRGNVWTVAKNTVEKGLQYAYAHRQLKKRTFRSLWIMRINAAVRAQGMTYSQFIGKLNAKGIVLNRKVLADLAMNEPKAFEAIVNAVKMPKMKTNAAAKKRFSFTGTGKIKRKHAYHSHILTKKSTKQKRNLCYSGTVSAADEAKIKNLLVKMPGGDDEDFAGLFSWLRIQISYICILIIYFDVPIGTGSKPTDISTFLRTPLMTGMENTMIWDFVWRLVLAALFGTIIGLDREYREKEAGFRTHFLVSLGSALMMIVSQYGFSEILTHDGVSLDPSRIAAQVVSGIGFIGAGTIIFNHQIVRGLTTAASLWATAGIGLTAGAGMSWLALAATILTLVALEGLSLVFRSLGSRRMVVVFSASDRTGVADTLDRIRTDGYMVVSYEVVPQVVGGDGITYRVTMVVKAKPGSDNNQLLALLRENTDIIVERIAMRHSFYRKRLVRRLTNLAPSILSLDCVGGVMAHDLRLRFNSPTVNLFFESCGDFIDYVADLRYYSQAELCECPYAYEGARRYPVGMLKGNGTLPDIKIHFLHYRSFEEAREKWLERSGRLDFDNLCVVMQAAELDEGLLERFERLPISRKVILGYETLPLQSPSIFKMRSLDSFVPGRILDYNGLSGRRYLDDFDYVAFLNDGTIRAQNCPPPQKFRDMYLIPDDFSPERLKGKTIEQVCYSINQIGLFWENGNIQIMGSFSFSRNGRTHVYEEIYPVTEDPGLLCLLQQQITDANISSARDSLSLYFSNQSVLVLHSNPHFESFIIDDRIIVMRLRPNMGKIAEAENVRLITTDRYRNKQPCKMDMKTLIYIIGIFFLLTSCYQQEFHPESGDLIFQVGIAGGMTEAIADATGGESDLSFTHVGIITVEPAGIYVLEAKSEPGVTMTPLQKFLDSSATIEGRPAAAIARITLPERRELATRAIGEAKKYLGQPYDDSFLPHNGKMYCSELVWECYLTGSKNEHLFTARPMNFRTADGRLPQFWIDHFAAMDQPIPEGVPGTNPQDMSREKFLKIVYRYWQMTKHQHITSKTFSGAKPASTPSSPKIDGKHTLEQNKNTRSGKTNPLETLDNNPRHFTPQGINKHKYSGFITPSEILPTKFFLLFSPPMLLFLPFNINIITNGSYKIRLFLPIIFDSFFPFVRRHTGYSAKFSKKIWTTTTKTHYTNENMFYIFLFRTILFFIGSPLSSLSFSPLIFQSESECKGKALFSNFQIFREENFKKNFFRTCRCELCFSLKAVAKIRAFALIIQIFFTLFSHYFRRIVTLDMFIVWDYFNPPKIAFGSELRPIPFCRLSLLYFPSDIPLPNHITNHFRPEEPDYLKMRPLKFHPILKQTLWGGERIIPYKELASGLSRVGESWELSGMPGSESVVAEGPWAGSTLSELIGRFGAELLGKANYARFGQEFPLLVKFIDAREDLSIQVHPDDELARKRHGKSGKCEMWYVLEAEPGASLLTGFSRPIAPAEYERRVADNTLTDVLNRQAIASGDVFYLPAGRVHSIGKGSFIVEIQQSSDITYRIYDFDRRDAAGNSRELHTELAREAIDFESSENSRITYAPENNQEVRLVTTPYFTTSLYTLTARTRCDWSATDSFVAIVLLQGSGSLTDNEGNRIDVRQGETWLLPASTQWTEITPHTAPLRLLTSRIMKSQTNGRGCAACDAGPDHDHHSQSYWSPVASAVLFAAGLVMQYTGVEFFASPAVRFCWYLAAYFPVGLPVLREAWNGMRQRDFFTEYTLMSLAAIGAFYIGEYPEGVAVMLFYSIGEALQERAVERARRNIRALVDIRPEQANVLEDGKPVAMPAAQVVPGRTIEVLPGGRVPLDGVLLSEAAPFNTAALTGESTPRTICKGDEVLAGMISSQHPVRIEVTRPYGESALSRILSMVEEAAARKAPAELFIRRFARIYTPVVTGLAVLIVALPGLWSLLHGGFAYSFDEWLSRALVFLVASCPCALVISIPLGYFSGIGVASKAGVLFKGGSYLDAIARVNTVVFDKTGTLTEGLFEVREVHVAPGVNSGELLGWVASAERTSTHPVARAVVQYAEREGVALLASEGAAEIAGHGIRAEFDGKQLLVGNTRLMARFGVEYPSEVDAIPETIVVCALDGRYAGYLVIADKPKEDAARAVAELKSLGIEDIRILSGDREALVANLGRRLGVSEARGDLLPEGKMEILEALRGEPGKVTAFVGDGFNDAPALATSDVGVAMGALGSDAAIETADVVIQSDQPSRLPAAIRIGRLTHRIVRQNILLAIGVKVVVLTLGALGIATMWEAVFADVGVTLLAVLNAVRASNRRFMNENEYISSLKARDIRPTALRVLILRTMAGFDRAFSLADLEEELDTVDKSTLFRTLTLFLAHHLVHGIDDGTGSLKYALCSSDCDCEIDDLHTHFYCTHCRRTFCLRGVAVPQVGLPDGFSAETINFVIKGICADCSGRNMKKILVIDNYDSFVHNAVQLLRESSEPVNITIQLNDRIDFEKFGDYDGILLSPGPGIPEEAGDLMAAIGQIVRQRIPVLGICLGHQALARAFGAELRQLSAPLHGHPTTLTVTDAGDLLLQKIAPPLIVGRYHSWVVDPDSMPEELIASSHDEAGHIMSFYHRNLPIHGVQFHPESCISNCGPALIRNWLATCMEAQLVRKAVNRCAAQGKPFLFGVDFELREGFFVENPLVCRQIPFACGEITNVPDSFSGEAEITPRLEILHTDREAYLRRFAVIRRGLLRGDSFLTNLTERTPIRTNLTLEEIFRRSCARYKLLLPGRLVCFSPECFVRITDGVIRSYPMKGTIDAALPDAEARLLEDYKERCEHYTIVDLIRNDLNRIADRVRVERFRYVEKIATLRGEILQTSSEIAGDLRSGWRQELGDLLFSLLPAGSISGAPKPATLRLIRDAEQCPRGYYTGVFGYFDGRDLDSAVMIRYIECENGRFYFRSGGGITVHSAPQQEYDEVVTKIYLPIPMDELLFIETIRVEDGTFVRPELHLQRMRQTVREAYGVASGFDLADGSIPLQHRKGTVKCRIVYGRSLSEISFAPYVPREIRSLRLVAADDELDYHLKYADRSALARLLQRRDDCDEILIVRDGAITDTSYSNVAFFDGRKYVTPDTFLLNGTRRQYLLGTGVLTECRITPSDLGGFERVVLINAMLGIEDDLAVPIERIRGLMKSSINFLPAEKRRDLHQLVEIIRNEIKDCVMIILYGSYARDMYVDCDRRRDYGVTTFFMSDYDILIVTRRRLGLKEYDVYARITERFFENKQSEFYTRPQFINESISRLNKNLELGQYFYHEIKKQGIMLYSSQEFKLARCRKLNYAEIAQIARDYFSEKFQFASDFLLGARYYAGLQKYKMASFHLHQAAENYLRTIPLVYILYGYKDHALEILMDRCKTHTLQLVSVFPRNTEEERRLFNLLQDAYVQARYNKDFVVTKTDIDALIPRLELMRDITEKVCCDRIAYYERQSMKKTDYSSWRRLERVIESSGLTINSFARYVGLPRGENLYQIKRGNYGVSLGVAKKIHAKFPQYPISWLMHGEAESAATPEGDAFVVRIPVYRDSSVAEFPPKEVPERYLLLSAEEARGAQIALCTDDQFGTVLQHWLVLLREPDGEVINGRVYFVMTECFYLFCSVYRIEGDPARLRLKSLFATADDDLEVRCEEICVMWPVCGAICGLKMPNLEKNKAIALFSYLSIEYKNKKGWIRKIHPFESCFVRIKGLPHECKPNVYQRIATALASVPTSPTVILHGLAPACPFRLRGRRISLHDIILFMKLRLCFFMLALGICGAVVQGCDDNDDNLDVLDKLQAAFSQKYPEASPKWKTRSNYYIADFQNQNYAAEAWFTSDAVWLMTETDLPHASLPEAVKNAFKNSEYGQWSLDDVDMLVREGMEPVYVLEVEQGPREMDLYYNAEGILIKVVEDSEDDSEDYLPIELPEEVKNFLQEKYAASKIVETDQEHGQFEVDIIHDGVAKEVLFDNSGNWLSSSWEISLDTLPEVVKTAIRQEINDKYVGYETDDEPELVETPDGNYYRIELEAEDDREVILKIREDGSLLQMSAQNRLSVFIGNSNRYASVDLSDFRRRLCVEYDISAESLNDYYRRCGRDWGHVGLALEIAMRDVCDHYKRYKCEGWGRILIELRIGPESSYRVPFYDRVHCYSDYWHEHYDSYCKRHGKYLRTSTGIRNTRNTGSGNTGDIMTTTMTIEMKKILLVLVCSLFAFETVSAQGKNAVGLRLGDGVEFLYQCDLSSRNFLQFTLATPHFEGLSVTGIYNWRCCRWNWTPQTCDWYLNVGVGGALGLYDFDDSGFLLGVAGSCAFGCHFKNAPISLEVDYRPVIGAVIGGGHDGFFDPGFWNFGLSVKFHFMTFVILLYCHQTEKGKEWENNFNFQKWTRLSELNRNTILTMDYTYLYKHSYQRIDEIQNLLPYDIFISSYVNSQRVQEPADNIQAGQKIWFATEEEGRDLYLSGKDVTFVKANEDYAPITEKLDTLQLSGKSVCVDATGCRGPYLMFLMRCMSMYKINKFDILYTEPTQYRCAMDSNIYAPAYDPFVTAQAISEYVEKQNKRAPITNIYLSPLSTKPHALGMACIFYGNMDLIKTLVMAKITVRDTNVTVILLNENDYICLTDIARYKSDDSNAVIGNMRNRNTIEYLGIWESLYNPDFKPLEFEGFRKEAGLNAFTLSPQKWINTTNAIGIISKSGRYGGTYAHKDIAFKFASWISVEFELYIVKEFQRLKEEEQKQLGWSAKRELSKINYRIHTDAIKQNLIPAEVTAKQASIIYANEADVLNGAMFGMTAKTWREQNPDLKGNIRDYATINELICLSNMENLNAVFIDQKMPQGERLVKLNRIAIQQMQVLESNDERKLLKMDLRKINSYMILLAIVVVVGLFVSTVARLVILAKGVDAGTANLVFLIMLGTCAIAYLTILAAFSSIADFIADKILPKIARKKALTAEATRIPPIDDIPDSDVEQIKQEADKRFLERQKEQIELFRRYGHREVGPYITSDELVRLDRYIEYYACRNPARQNLLLFVRKSMKNADLFHFGWNMAHYFGRPKQEVVPWLKSAFAPLAELEDSYIKGKLYSPQTRQFTIPNIPGYMAEHGGMSLRDLLESGANVSVTVTLDDLRAIFNEAAKGGRIFGALRNRDQRPRTGPGNADEIEMGNTPNEWLFVCELFSIFVTSSVVMRSADILKVFSHCLYNEIMKKILSVLYIATLLFASCSDEYDDSALTGRVDNLENRVAKLEELCKQMNTNISSLQTIVTALQKNDYVTNVTPIMQNGKEVGYTITFSKSNPITIYHGKDGQNGTDGEDGKPGVDGEDGKNGHTPVIGVKQDTDGSYYWTLDGDWLTDDSGNKIKAEGTDGKDGTDGSNGEDGNDGQDGKPGMDGKDGITPKFKIENDYWYISYDNESTWTQLGKATGEDGKDGEDGISGDPMFTDIDYETNTDYVIFTLSNGTQIKLPTWSAFEALKTLCNQMNTNISSLQTIVTALQNNDYITEITPVMQDGIEIGYTIRFNKSNPITIYHGKDGQNGTDGSDGKPGADGQDGHTPVISVKQDTDGVYYWTLDGKWLTDDSGNKIKAEGTDGKDGADGSDGEDGTDGANGKDGITPKLEIREGYWYISYDNGTNWTQLGKATGEDGTDGTDAVSIFKEITQDEDYIHFKLQDDSVISVPKHHPLSITFSETEDIRVLADKTYSIGYTITGADENTVIKALAQDGFRAVVKKTDNATGTIEITTPSTILPSEVLIFVTDGKERTIMRSINFVEGVIVVTTKSYTVGYNGGTVTVDLSTNIDYTVEIPEADKSWISVADTRTRAAMRDETLTFTVASNSALTVRYSTIRLVDNLGITSETILITQKSGTSQTVHVTTAGTLDQLINSEDKDIIEELTLTGKINTFDFDFIRTMKNLKALDLSKTDNTTIPASCLANTNISTVLLPLGLTAIPNRAFYQAAITSIYIPETVQTIGEYAFYQCKSITGNLVIPDATTSIGNYCFTSCTFNGTLTLGNGLQTIGESAFGGNQSLVGDLTIPVTVTSLGASAFSGNVGFNRHLTIDSGINIPFACFYDCRNFSKLTIAEGVNIIGESAFENLSSITGNLKLPNSITSIGARAFFGCSKIDGYLSLGPNITSIGDCAFVKSIDSEEIIQEKEKLSTDPDMDYYDRIIYDDTYYSAIFSKIYIQSSLPPTITIKSFGLKETTISDKRFIKREIVERQPGWSRKRQYDIYNAYRYRGSYPNHLIVPTGCTANYSDWEVDLIEEVDFMNTFTAYEKAIEGYQFQVGRYNIWMNYYAIFVGALFVALYSIWPKSEIETLCCACKPVCGKAPAAVAESQEWFLPLIISVLGWIASLCWYGALLGYRKWNEHWIKVVQGIEMVLNKDVYPNVYTAQPERPQKESLWKRIKNIFRCNKSKCYAPGFVSTQKITGIFIFFAALAWGGLITYILYQWCCGWNLWSIILSVLCGFLTVVLLCRLHWGKSRFYSSTIIDRMKRNYIYLRIIASYEYYFSGTIPFDVKNGGSSASVLFKIQYSINKNFQLYKKMRTKCGHISQNKNLKMFSTNNQNINTFQPRTICSIDDFCRKTPAHSPIQRTAEVFVKILLLLRQMDNVKKYGLKEQVALLPLSPGVYQFLDKNGTIIYVGKAKSLRKRVSSYFMQNKEHSAKVQVLVRQIAAIRHIVVDTETDALLLENSLIKTLQPRYNILLKDDKTYPWIVVRREPFPRVQSTRILNRNGSQYFGPYGSVMMQRSILEFIREVIPLRTCSLNLSPAAIAKGRYSVCLQYHLGNCKGPCVGAQSEEEYDALVDMTVSILKGDLRPVRTYLEKEMEAAARNLKFEVAQRYKTRLDALDNYSSKSVIVSARIVDVDVFSLLVDDDVAYCNFLRIRHGSVVGVYTIRLTTGIDTDPAQMLTLAIQHIAETIAGTLAKEVIVPYLPSAAQLFDGVTFTVPKRGEKLDLLEFSLKSARIYRAEQLKNLEIKNPERHTERLMATMQKELHLDRPPRHIECFDNSNLQGTNPVASCVVFRDGKPSRKEYRHFNIKTVIGADDFASMREIVFRRYSRLIAEGAELPDLIIVDGGKGQLSSAYAVLCELGIEKQVPIVGLAKRIEEIFFPGDPMPYYLSRTGEPLKVVCHIRDEAHRFGITFHRQKRSKAFIHSELENIEGVGPKTIELLLRHFRTVEKIRTAPAEELSALVGPAKAARLLVHFGRQMKNFLFLLCILSLCFGCDKAYDLNKIESGDVTIGNDQSEWIMPLAQITVGMDELQDGSADIRAIFDEVDIWLPTTLPGNAEWVDIVRLSSDGTYLDGMLEALIDEMLVPGSKKMDEVVDLIWSNEGYRERFTALIPADSEELFKAEFKKFFGEDNEAGEALRDTMGELAREFLSQIKINTITYNATLDVDDDLIDMLADNLDPEGTVDPVNTLDLYGEVRSSLPVSFEVAADFSETNVAIAPFLVEPDEENDIAPVRLYKDDIRSLFSFFELNVDFMPQKYYPRIGFSDSQSIRMMLHLKKRGGLNLNLMKKIIYTLIAAFVACTAVAQTPSAYFMEGSTFRSQLNPAFAPLRGYVNIPVLGGVQVNVSGNLSVSDIFYPVNGSLVTLFDKNVSAAEALGNLRSKNMLGTDARINIVGFGAFRKDHKTFWSFDLNMRVEAEANMPYSLFDFLKNGRNEAVINDIKASTQAYLEAAFSYSFPLTDQIYLGARGKFLVGAGRARTSIDRLDIKLQENSWNIDADGSFEMSGLEMSSMQRPDGSEYYSFNDFDVSSYKGPAGYGFAVDLGVTYDVIPDLQLSFAVNDLGFISWGKKYLERGQMTKSQSFTGVEIIDGEVHDPEFDFGELEFDRVQASKGKTEMLRTSINLGAEYEVWRHKIGLGLLYNVRVWDVKTFHNLTASVNFHPIPWFTLTTSYSFLNGQGHALGVAINACPSWINFFLATDMLICSHTPQFLPVTSTSMNVTLGIGVPIGRRSHRIPGEYLYRMILVKKPASVDAGFFDAVFSLFTILCRNRCLPVFDGGIPKGYVFGPENTWERMTKTEIRKQMKGLNTALSSEQREELSARIFNEAERLPAFARAKVVALFASLKDEPLTAPALERWSRSKRIVLPRVEGDIMRFYDYDPASMNDSGSFGISEPEATALCRPEEIDFIIVPGVAFTAAGMRLGRGKGFYDKYLSQPGFRAFKAGVCYPHQVVEELPADPFDVPVDHLCCGRMGCFLTNSSLGKKLVMSITGCFLVLFILFHMSMNIVAIFSPEAYNTVCAFLGANWYALVGTLVLVAGILIHFIYALVLTVNNYKARGSQRYAVTVKEKGVQWASKNMLALGWIILGGLLLHLFNFWSKMQLVEVLGHHENSLGFSPQDGAALIQYTFSQWYYVVIYLVWFFALWFHLTHGVWSMFQSVGWGNDIWYPRLKCIANIVATVVFLGFAVVVLVYFFRSLCCGCVCMAFKLDSKIPAGELAQKWSNHKAAIKVVSPANKRKLDIIVVGTGLGGASAAASLGELGYNVKVFCIQDSPRRAHSIAAQGGINAAKNYRNDNDSIYRLFYDTIKGGDYRAREANVYRMAEVSNCIIDQCVGQGVPFAREYGGMLDNRSFGGAQVSRTFYARGQTGQQLLLGAYAALNKEIAAGSVKSYPRHEMLDIVIEDGEARGIIARNLVTGELERFGAHAVVIASGGYGNVFFLSTNAMASNGSAAFQCYRKGAGFANPCFTQIHPTCIPVHGDQQSKLTLMSESLRNDGRIWVPKKIEDVKALRSGAKKPSDIAEEDRDYYLERRYPAFGNLVPRDVASRAAKERCDAGFGVNETGLAVFLDFKTAIERLGKDVIKQRYGNLFDMYEEITDVNPYEQPMQIFPAVHYTMGGIWVDYNLMTTIPGLYAIGEANFSDHGANRLGASALMQGLADGYFVLPYTIGDYLSHKIQAPKVKTDTKAFDEAEKGVKDKISKLLSINGKQSVDDIHKKLGHIMWENVGMARSKESLEKAIVEIQALRKEFWKDVKVVGKANEFNVELEKALRLADFLELGELMARDALNREESCGGHFRVEHQTEEGEAKRDDEHFVYAAVWEYKGENEAPELTKEPLNFEFVHPAQRNYKDMNFTLKIWRQKDAKAKGAFETYKVENISADTSFLEMLDILNNNLIHEGKEPVAFDHDCREGICGMCSLHIDGRAHGPGDGATTCQIYMRRFKDGATIVIEPWRSAAFPVIKDLVVDRSAYDKILQAGGFISVRTNAVQDANNIPIPKADADVAMDAAACIGCGACAATCKNGSAMLFVAARVSSLAKLPQGRVEGARRAKAMVAKMDELGFGNCTNTGACQAECPKMISISHIARLNREFLSAKFEDMFKELNPLLHSELRLAVMSILLGVEEADFVFIREQTGASAGNLSVQIDKLQKAGYITVEKTFRGKMPRTLCRITPTGVDAFEEYVEALKSYIKKMEERKLDARESMELISRMIQNTRNRLENHAGRPFLVWGYTTVGIALLNYWFNIAGCHPAWCFTWFLIPIIGCLLMRLFPDKKPTEPRTEIDRIVGKVWLVSSLSLIPIFLFSLFHGLSYRHSLFELITLVMATATATTGMIVRSKIYIVTGLTCMALSVLFPLYDYFLKKIATSDGIEITAGLLNNEILIFAGVFFIMMVVPGHIINYQSHKRCSRNMETTRKIDAKAARRKRRLIREWITYAVICAFLAGVNALTTPHYWWVLWVMAGWGLGLILDLIFHLTKLSDDDDAEMAHTLFVPLMLTLGAGLATGIGSTIALFAHRTNKRLLSFSLGLSGGVMIYVSFVELFQQAREAIGAIYGPQTGMGITTLAFFGGVLLIGVIDRLVPSVENPHEAHMIEELEKKPKNAKLMRMGLMTALAIGIHNFPEGIATFATAVENPTLGIAIAVAIAIHNIPEGIAVSIPVFYATGDRMKAFRYSLLSGLAEPVGALLAYFILMPFMSPVMMGCILAGVAGIMVFISIDELLPAAREYGEAHISIYGVMSGMAIMALSLILLGMSHLEYCFSVGLCKDSASRKLCQIYLVTAEAPLIFCKDSASRKPSQIYLDATEAPPVFCKDRARGRFGFVGSGRGLPICRKVSEFYPFFAGEHRIRSVRCVKIPSYGDRFTTFGRRRSLFPASRVFSRSGLFLRRLKISSAVHDEIILEEILFNLLISSVICIFRVEVDDIFRKRWCEWCNNCYLYPINKAGSFMIMTFNELKITDPILKAIGEKGYPAPTPIQQKGIPVALDGRDMLGIAQTGTGKTAAFAIPILQHLSSGMQAEPTDVPRRNRRGRNHGREYGVRPIRALILTPTRELAVQIGDSFSDYGKYVGLKHLTIFGGVKQGPQVEALRGGVDILIATPGRLHDLIGQRFVELDAITHFVLDEADRMLDMGFVADIKRLLPLLPKSRQTLFFSATMPADIVALSKSMLTDPVRVEVTPVASAVDAIDQRVYFVEKPEKKKLLVSLLREEDKSVLVFSRTKHGADNISRLLSKSGIRSEAIHGNKSQNHRQRVLTDFKSGKIRVMVATDIAARGIDIRELEIVINYDLPDVPETYVHRIGRTGRAGHSGTALTFCTPDERPLMKDIQRLTGKKLNAETYRAMAKSQTFGKRENEKKKQAKRLEKQKRREERQAGGSSSLDDMIAYVDENGNITDTPPQLRPKVEIQLEDIVIATPKKEDIAAEPLKGRVEYFNTEKGYGFIKDLASTEKYFFHISSAPEGIGEGRIVLFELMRGTRGMNAVKIAFAQMNIYVSNLNFRTRGESLQTLFGEYGEVSSANIITDRETGRSRGFGFVEMPDESAARNAINALNGFELDERAINVNEARPKTERSDRGGYGSNQGGGYGRNRYMAVRSGGRASERGPKLLPGRIVLSLQDAGEIFWPGYLAETVNYAYLCPMFSFIPNAFQEAQYVRRRHFRGNHSENISNFYYNFSKLLGMKTILNGAKFYRDGRFETGDLAIEDGKIVAIGGRVALEADDRAVDLTGCHVLPGLVDVHVHLREPGFSEKETIATGTAAAAHGGYTTVCPMPNLNPAPDSPEHLEAELALIRRDAVVRVLPYGSITRGQKGRGELVDFGALAGEVVGFSDDGRGVQGEELMAEAMRRAAAVGKPIVAHCEVDELLKGGYIHDGVYCREHGHKGICSESEWRQVERDIKLAAETGCQYHVCHVSTKESVELIRRAKAAGLKVSGETAPHYLLLCDEDLQEDGRFKMNPPLRGREDREALRQAVADGTIEVIATDHAPHTAEQKSRGLAGSAMGIVGLECAFPLLYTYLVKPGLLTLEQLVERMSMAPRRIFGLGGGLQAGEPADLTVFDLDAEYEIDPETFLSKGRATPFAGWRVAGRTLWTLVGGRTAYATERFRMKPFTKKIVLESGREFYGYGFGADREATGEIVFNTSMVGYQEILSDPSYTDQMVVMTYPLIGNYGITDEDYETKYPTIGGMIVREYNDLPSNFRYTKTLGEVCEEYGIPCVWGIDTRMLTRIIRDEGTQRVIVVDASMPQEEALRRLKEAPVRRDMVERVSCRKRWFSRTANHRFDVVAVDCGIKHNIIRKLNEKGCNVTVVPYDITAEEVMAFRPDGLFLSNGPGDPTDVQPVIEMVRTLRGRLPIFGICLGHQVISLAYGARTFKMKFGHRGGNHPVKNLETGKVEITSQNHSFAVDTESLKGTGLTLTHLNLLDDTAEGVECRADRIFSVQYHPESAPGPQDSTYLFDKFIKMMEESQNAMPKRTDIKKVMVIGSGPIVIGQAAEFDYAGTQACLALKEEGYEVVLVNSNPATIQTDVQIADKVYMEPLTLEYVAKIVRYERPDAIVPGLGGQTGLNLAVQLAKKGVLQECQVEILGTSFQSIEQAEDRELFKELCQSLGEPVLPSLIANNIDEAVEAAKRIGYPVVLRPAFTLGGTGGGFADDETQLREMMRNALSLSPVHQVLIEKSIKGYKEIEYEVIRDHNDTAIAICNMENIDPVGVHTGDSIVVAPSQTLTNKEYQLLRDSALRLIRALKIEGGCNVQFALDPLSFNYYLIEVNPRVSRSSALASKASGYPIARVSAKIAVGLTLDEIRIANTPASFEPALDYVVTKIARFPFDKFSDASNQLGTQMKATGEVMSVGRTMEESLLKAVRSLETGVCHIYHKKFDDWTVDRMLSYIKEGTDDRLYAIAELIRRGVELALIYNSTKIDMFFLEKFKNIVEFEKVVAANPRDIETLRDAKRMGFSDKFIGQLWGMSQKEMFLLRREHNIFPVYKMIDTCASEFSSYVPYFYSTYEQENESIVSEREKIVVLGSGPIRIGQGVEFDYSTVHAIWSIRAAGYEAIIINNNPETVSTDYTTSDKLYFEPLTVEDVMNVITLEKPKGIVVSLGGQTAINLAEPLHELGVPIIGTGVEAIRNAEDRGCFEKIMEELGIPQPEAEAVTDIEAGVRAAERIGYPVLVRPSYVLGGRAMQIVSNEERLRHYLQTAVEVNEDSPVLVDRYIMGRELEVDAICDGKDVFIPGIMEHVEKTGIHSGDSISVYPTFSVSQKAKDKIIDYTVRLGRRIGIVGLYNIQFILDGEEDVYVIEVNPRSSRTVPFLSKATGVPMADIATRVILGHSLREQGITEVYGRERSRWFVKAPAFSFAKIRGMESYLSPEMKSTGEAIGYDNKLTRALYKALQSSGMTVANYGTIFLTIADKDKQDALPLVRRFYDLGFNIEATKGTAEFLRQHGIRTRTRRKLSEGSTEIIDSLRQGHVSYVINTIDINQHNTRLDGYEIRRTAVENNVTIFTALETVKVLLDVLEEITLGVSTIDAEMLRFRLNFKGAGFAPTEAGHGKSILAGMGLSRTARRCERCPLNETRFMYKKGIYTVTANEPLTPSVWRMTLEGDTQYLTRPGQFVNIEVEGLYLRRPISVCDYDERTLTLIYKVVGEGTARLSEMKAGVKLDLLTGLGNGFDPDAECRRPLLVGGGVGVPPLYNLAKKLIDKGRKVTVVLGFNTASEVFYEEEFRALSAEVFVTTADGTHGTKGFVTTAIAEKKPDFDYFYACGPLPMLRALSDATGDIPGELSFEERMGCGFGGCMGCSCQTKNGAKRICKEGPVLKKEEIIWMVNEPKKNFDTSVTLSGLRLDNPVVPASGTFGYGNEYKDFYDINILGSFSFKGTTREARFGNPTPRIAECTAGMINAVGLQNPGIDAVIGEELPRLKTFFRKPVIANISGFSVEEYAYCCERIDKEEQVGLIEVNVSCPNVRHGGMSFGTSPEAAAEVTRAVKAVTTKPVYIKLSPNVTDIVAIARACEQAGADGICLINTMLGMRIDVKCRKPIIANVMGGFSGAAIFPVAVRMVYQVARACRIPVMGCGGVETARDVIEMMMAGATAVQVGAANLRNPYACKEIVEALPREMERLGIERLSDIIGIVKMTNRDVIIACDFSSAEETFRFLDLFKNEARKPFLKIGMELFYAEGPEIVREIKRRGHRIFLDLKLHDIPNTVKKAMAVLSRLDVDMCNVHAAGTIEMMRAAVEGLTRPDGTRPLLIAVTQLTSTSEERMQRELLISASINDTIVKYAQNTREAGLDGVVCSPLEAGMVKAACGKEFLTVTPGVRFADGEVADQVRVTTPARAREIGSDYIVVGRPITAAADPVAAYRRCVEEFVKMKPVTLFYQPRCPFCKKALGYLEELQRQEPYSRIEIRMIDELAEPEVADRYDYYYVPTFYVGDKKVHEGGIMPDEVEAVLRMALDERMEREIAKGLLSIGAVFLRPEQPFTWASGIKSPIYCDNRLILTAPEVRKKVEAAIAETVKAKFPACEVLMGTSTAGIAHAAIAATILDLPMGYVRSGSKDHGRGNQIEGKLDKGQKVVVIEDLISTAGSCIEVVEALRAAGAEVLGVVSIFTYGMKKGLERLAAADVINHSLSNLDALVEVAAEEGYIKPEDRQRLIAFRDNPSDESWINKMRHLIDPTDLSVAEIGQIIALAEDIIANRAKYSEACKGKKLATLFYEPSTRTRLSFTSAMLELGGSVIGFSDAASSSVSKGETVADTVRVIRCFADIIAMRHFKEGAPLVGSQYAGIPVINAGDGSHSHPTQTLTDLLTIKREKGRLDHLTIGFCGDLKFGRTVHSLIKAMSRYEGIRVVLIAPDELRLPEYMLHEIETQTEGVEFREVSTMEEVMPELDILYMTRVQKERFLDEEEFNRVKDSFVLDPSKLRTAKSDMIVLHPLPRVNEITRAVDNDPRAAYFRQVENGKFVRMALIYTLLKWAEGEKLAAVPDLAEGMFIDRSMKCPNSRCISATEDVDPLFVKAGDTCRCAYCEAKIRMERIQMHHTRRKRQQMLSARCAAGACSVVPASDFIDGTMQEGTNRLPAAIMGSISDWDVMSDAAATLAQFGVEFEKRVVSAHRTPELLVEYAKTAKSRGLEVIIAGAGGAAHLPGMVASMTALPVIGVPVKSRALNGLDSLLSIVQMPGGVPVATVAINGAKNAALIAVSILALKDEALAARLEMFRAKQTEDVLKAELMSAVKTIGIIGGGQLGLMIIEQAHLLGARTICLDPAEDAPAFKISDERIVGRFDDPAALEELCRRSDVVTYEFENVPGDLLVALEQKYNIKQGFRPLFDSQDRLREKSNACDHGLKTPAFMAVDDEESLHRAIARIGYPCVLKTRTLGYDGHGQAVLRGEADLAKARELLAVPCILEEFVPFDFEASVVLVSDGERVICFPVGRNIHKDGILDLCIVPAEMPDQVRERMVSQSKRFMRDCGYRGILAIEYFVKGDEVYFNEMAPRPHNSGHWTIEGSTTNQFRELCRYLLDMPLEEPQLKAPTVMKNILGQDLERAEALARENRPGVYVHIYGKTVSKPKRKMGHVTFVGVTGEEYAAKWADRFVKMKSYRIFVEKYPEFRVEAESLLRDLNANLNLSLDGLRLLNVYDLFGFSDELLEKSRYRVFGEVVTDAVTDSCDLGGNSFLAVECLPGQFDQRAASAVDCVRLIDPSAEVKIKSSKLLIFPSKLPKETMERIRRYYINAVESREKDLRVLDDLESAPVKPVPVLDGFREMEDAELDAYCKKNGLAMNADDLREVVEYFRREGRDPFETELRILDTYWSDHCRHTTFTTELENITVEESFVKDEIEGTLALYLKIRRELGREGKSICLMDLATIGARYLRSKGLLDDLEVSEENNACSVFVDVDVDDRTEKWLLQFKNETHNHPTEIEPFGGASTCLGGAIRDPLSGRSYVYQAMRVTGAGNIYQPVSETLPGKLPQRVISLKAAAGYSSYGNQIGLATTHVREVYHPDYVAKRLEVGAVVGAVKAENVRRESPVPGDVVLLLGGRTGRDGVGGATGSSKEHTDKSLEMCGSEVQKGNAPEERKLERLFRRPEVTRLIKKSNDFGAGGVSVAIGELTDGLDIYLDRVPTKYSGLNATELAISESQERMAVVIEASAEEEFKRYCAEENIEVTHVADVTDSRRMRMYNKGKLVVDLSREFIDSAGAKHYAQAAIGAVEERDPFRREVKGGTLREKMLANLADDNVLSQKGLIEMFDSTIGASTVLLPFGGRTQRSETQVSVQKLPTDGYTDTASIMAFGYNPFLASWSPYHGAAYAVVDAAAKVVAAGARYDKMRYSYQEYFERMTKSPRTWGKPLGALLGALKMQVELGLPSIGGKDSMSGTFEQINVPPMLMAFGITTVDAGRVISTDFKKAGHSIYLVRHTPLENHMPDTGALKRNFDFVSSAIESGKIVSGYAVGFGGVAEALAKMSFGNGIGADVEVDEATLFDNSYGSIVVESTEPLDFPAAELLGHTEAEESLTINGEKMPLEELYRANTERFATVYPDKGINHAPVMEAMPALRSFTYPGEAVERPVVFIPVFPGSNCDYDTAKAFRRAGAEVRSEVFCNLTAEAIFDSIRRMKEAIAACHIFVLCGGFSAGDEPDGSGKFIANVLNNKDISEEIHRLLDRGGLILGICNGFQALVKSGLLPYGRLGLVTKESPTLFRNDINRHVSQIVSTRVATTNSPWLSSFSVGDIHSIAVSHGEGKFVVNEPLARELFENGQVAFQYVDAEGRVTAEAPYNPNGSYYAIEGIVSRDGQILGKMGHTERYGENLFKNIAGEKVQDIFTNAVNYFRKTKMQQGEMLYEGKAKQVFLTDDPDMILIHYKDAATAFNNIKKATIENKGVLNNRISTLIFEYLNKQGIKTHYVKTLNDRDQLCRRVRIIPLEVIVRNVIAGSMAQRLGIEEGTKPSNVIFDICYKNDELGDPLINDHHAVALGVVTYDELKQIYAMTARINEVLKELFAKMNINLIDFKIEFGRTSDGEIVLADEVSPDTCRLWDMATNEKLDKDRFRRDLGKVREAYEEILARLEKVIKMHKESIMQPICDRELHEECGVFGVVGVPDAANLTYYGLHSLQHRGQEGCGIVSVSKEGAMRRVRGEGLVTEVFNEAKLANLAGDMAIGHVRYSTAGGGGTENIQPFLFHHNTGDFALAHNGNIVNADLLRNYLENKGSLFQSTSDSEVFAHLIKKEVRNHNRPRIYSIIEALNMLEGAFAFLVMTANRIYACRDKYGLRPLSIGKLGDGYVISSETCAFEVVGAEFVRDVEPGEIVTIDRHGIRSSDYSMFKRHMMCAMEYIYFARPDSDIEGRNVHAFRKESGRLLYKEAPADADIVVGVPDSSLSAAMGYAEASGLPYEMGLIKNKYIGRTFIQPSQSMREKGVRMKLSSVSGIVSGQRVVLIDDSIVRGTTSRRIVRLLREAGATEVHVRIASPPFKNPCFYGVDTSTYEELLCARMSVPEACEYIGADSLAYLSPDALLKAGNRCELCMACFTGNYPTSLYGTIEEANKKEKCMAESYEKAGVNLEAGYEVVRRIKKHVASTSRLGVMGNIGAFGGMFDLSALNVKEPVLVSGTDGVGTKLKLAFEMDKHDTIGIDAVAMCVNDVLAQGAEPLFFLDYVAVGHNEPAKIEAIVAGVAEGCRQAGCALIGGETAEMPGMYAGGEYDIAGFTCGVVEKSRLIDGTKVRVGDVLVGIASSGVHSNGFSLVRKVVADAGLDLRKAYPELDGRVLGEVLLTPTKIYVKQVLEVIRACNVHGISHITGGGFDENIPRILSEGQGIEIHEGTWEILPVFRLLEKYGKIAHREMFNIFNMGIGMVIAVSQDEASEVIAILEKQGEKASVIGRATDRPGVEIRMKTIAVFASGNGSNFEALAAACADGRIAARIALMVCDKPGAFVNERAARYGIPTFTFNPKEYPSKADYEREIVRRLRAERVELICLAGYMRILSDVVLEAYRDRIVNIHPSLLPAFKGAHAIADAFAYGVKVFGVTIHYVNGELDGGRIIAQRAFEYLGSDPEELEARVHAVEHPLYVETVAKLVAEQMRALISVSDKTGVVEFARGLRELGWQVIATGGTMKLLAESGVEVINISDVTGFPEICDGRVKTLHPKVHGGLLARRDDPNHLKALRENGIEFIDMVCVNLYPFRQTIAREGVTMDEAIENIDIGGPSMLRSAAKNYKDVTVVCDPADYDTILAEIRGYGNTTPRLRLQLSAKAYTHTAEYDAMIATYMREKAGLDEKLFLEFDLVQPLRYGENPHQQAKFYRSGERVPYSLAYARQLNGKEMSYNNIQDANAALAIVREFDEPFCVGLKHMNPCGAAVGRDAADAWTKAYEADKVSIFGGIVALNRPVTREAAELMKPIFLEIIMAPSFTPEALEVLSTKKNLRLLEVPMEKSDAKQRQLVSVTGGLLVQDLDLETRPVTADMCVTEKRPTERQLADLDFGWRIVKHVKSNAIVVVKDGRTLGVGAGQMNRIGSAELALKQAHAQGVTEGLVLASDGFFPFDDCVSLAAASGVEAIVQPGGSVRDEDSIRKANESGIPMLFTGMRHFKHMKVLVVGGGGREHAVVDALSRSPQVSKIYCAPGNAGIARQAECVPVKDTDVEGLLSLAREKEIDLTVVGPEAALVAGIVDRFREEGLRIFGPTKAAARIESSKEFAKDLMGRYGIPTAGYRAFDDYRKASEYVRSRPLPAVLKYDGLAAGKGVVIARTMEEADAALRDMLLDDKFGKGRVVVEDFLTGPEFSFMCFVSGRKVLPMVLAQDHKRAFDGDEGPNTGGMGAYSPLPFITPEDEAFALEKVMQRTADALCDEGCPFTGVLYGGLMKTPQGIRVIEFNARFGDPETEVVLPRLKSDIYDIFSAVADGRDPGEAEWHDFATLGIVLASKGYPGSYEKGYEITGTEQVDGVVYHMGTAIKEGRLVTSGGRVMIVVCRSADPEQARCRALEEVRKIGCENLFYRSDIGMKALSFLVKKMVISGKELAAACKAKMAEQVKTFPEKYGRLPHLVVVLVGEDAGSVSYVTGKTKAADEVGILNTTIRKPADISEEELLKIIDDLNADDTVDGILIQLPLPKHIDSDKVIARIRQEKDVDGFHPLNVAALWQKQPCVLPCTPKGIMKLLKDSGVELAGRKAVVIGRSTIVGLPVAKLLLDENATVTITHSRTKNLADVTREAEILVVAIGRPKFVTADMVGDGAVVIDVGVNRDPETGKLCGDVDFEACEPKASLITKVPGGVGPMTIACLIENTIEAFLKKVAKMIESSLILCPVRNPLKPDRPDLSPPTYSQKTGSSALVKQIKKQTQGKNLASAPDIDIMDKSQYKNVYVFVEQRDGVVQNVALELLGKARELADALHEQVVALLLGKGVKDKADELIAAGADVVLSIEADELAQYTTEPYAQAITQVIHERKPSILLIGATSIGRDLGPRLSARIGTGLTADCTGLDISEDGDLLMTRPAFGGNLMATIICKEHRPQMSTVRPGVMRAKAADPTRKGKVEEVKINFDKSKFRVRILETVKEQKNMIDITEAKVLVSGGRGVGTAEGFQTLRELADVLGAEVSASRAMVDAGVLAHERQVGQTGKTVRPDLYFAMGISGAIQHLAGMEESDFIIAVNKDKFAPIFNVADVGIVCDVHKVVPILTEKLKTMKKMKIVVCIKQVPDTTEIRLDPVTGTLIRDGVPSIMNPDDKAGLEMALELKDQYGAHVTVITMGPPQADDILREAFAMGADRAIHLSDRKFAGADTLATSNAIAGALRMLDFDLVITGRQAIDGDTAQVGPQIAEHLGLPQVTYLEGIKYEGGNRLVVKKWTEEGYQLLEVETPCVVTVLSSANQPRYMSVRGIVEAYDKQVEVWGFDNISVEESKLGLAGSPTRVFKSFTKGAKSAGKVFELEPAEAADLIVEKLKEKFIIMNFELTKTEQLFRQMIREFAENEVKPLAAEIDEEERFPVETVEKMAKLGIFGIPFPVNYGGAGGNNILYSMAVEELSRVCATTGVVVSAHTSLCAAPIYEHGTEEQKMKYLPKLCSGEWLGAFGLTEPNAGTDAAAQQTTAVDAGDHYILNGNKIFITNAAYAHVYIVMAMTDKSQGTRGISAFIVERDFPGFSIGKKEKKMGIRGSATCELIFENCIVPKENLLGKVGKGFSIAMKTLDGGRVGIASQALGIAQGAMDETVKYVKERKQFGRTIGQFQNTQFQLADLDTKIEAARLLVRAAAFKKDQKLPFSVDAARAKLFAAETAMEVTTKAVQFHGGYGYTREYPVERMMRDAKITEIYEGTSEVQRMVISSALLKMKRLENRVAIVTGGTAGIGEATALRFAREGAQVVVWARNEARGKEMEKKAAAEGLAITFDKVDTSDFEAVTAAAKRVADKFGKIDILINNAGITNDSTLKKMTVEQWQNVIDVNLSGTFYCCKAVLNYMLEAGYGRIVNASSVVGLYGNFGQTNYVATKAGLIGMTKTMARELGRKGITVNAVAPGFIETEMVAKMPENVLDGMRAKVPVGRLGRPEEIAAAYLYLASDEAAYVNGAVLSVDGGMTVMIKTGDKYRHEVTYTQEGVIAFAEITGDKNPIHLDPEFAAKTPFGRPIVHGFLSAAVFSKVFGMLFPGQGTIYLSQEMSFRAPVFAGEKYTAEFEVIDVNTEKHIGTIKCLLLDAAGKECITGTAKLKHNKEFIMEKEQIREIIAKRVAMELKDGDVVNLGIGLPTAVPDYLPEGVQIFLQSENGLLGMGPTPAPGEEDPEFINAGGGFVTALEGASCFDSATSFGIIRGGHVNASVLGALQVDEKGDLANWIIPGKKAPGMGGAMDLLTGADKVILAMEHTAKGAPKILKKCTLPLTAKGSVNMIVTEMGVMEITPEGIVLTEINPEFTVEQVQAATEAHLIVSKDLKPMKKMSGGLYSTEGRDFDQTLDLKKIKPYGDTMNDGKTQLSFTLPVPAGDEAIEAAKQLMKKMGFENPQVVFHRELTAGYTFFNCYGSCTHTVDYSNIHVPKVESTKWDMAETDSFIREQIGRPIVVIGASTGTDAHTVGIDAIMNMKGFAGHYGLERYEMFEALNMGSQVTNEEFIAKAIELKADALLVSQTVTQKDIHIKNLTELVEMLEAEGLRDKVILACGGPRISHELAKELGYDAGFGMNTYADDVASFIAQEMARRMHRKMNDMKSKLGIDFNQVEHARDVARKIANGVQDFVEGYTTVAVERTLCRLIGIDGVDANAVPLPNVVVEELREKNVLGEGALFFLGNAIVETGLTPQQIAEQIAAGKLDITRSAVCTAAEREAALKPYIDASIAKIAANRQRRENYIATIGEGPRPYLYVIVATGNIYEDVVQAQAAARQGADIIAVIRTTGQSLLDYVPYGATTEGFGGTFATQENFRIMRKALDEVGEEVGRYIRLCNYCSGLCMPEIAVMGALEGLDVMLNDALYGILFRDINMQRTLVDQYMSRVINGFAGVIINTGEDNYLTTADAVEEAHTVLASDLINEQLALLAGLPEEQMGLGHAFEMDPMLENGFLYELAQAQMTREIFPKAPLKYMPPTKFMTGNIFRGHIQDALFNMVGIWTSQGIQLLGMPTEAIHTPFMSDRYLSIENARYIFNNMKNIGDEVEFKEGGLIRKRAKEVLDKATALLERLEKEGLFSALEKGIFADIKRPMNGGKGLEGVSSKGRNYYNPFVEIMKNGSRAAAKKMRLKEAIQHTSGLRCVVEGMEICSSVGRRMLHEMTWLGEESAITAEHDRITSVLRLLETEEGRDRTETIRRKLALLRDIRSTIERTGGNCVFDDIELFELKFFALLAEELRPLASQGHLAELPELNGVVDLLDPEGNRLPHFFVYDAYSEELATLRKQIKARKQAGADESQVQELYFRSVEIEDRIRERLSVELRKYHEALQQALDRMGWLDVVIAKAMQARDWGLTRPAITQDTTSFRGLFNPELRISLEAAGKRFQPVNIRLTTGPTVITGANMSGKTVLLHSVELAQYMLQFGFYIAAERAEIALVDEVHCSIGDGQDQLSGLSSFAAEMMRMDELAKSVRAGRRVLALIDEPARTTNPVEGRAIVNGVLEFLADYEVPSLVTTHYNGIAAPCRKLKVKGFSETNAEERITLKNINDFIDYSLEEVTTDEVPHEAIRIARILGIDPEILRRIERNEELKNNQMGFVTNISDFGSLAIVGLEKNTGKTECLNYILGQLGGQAERFALTSVGIDGESRDQVCQTAKPEIEIPEGMIFVTSEKHYREKRLAAEVLDVSLERTALGRLITARAKMSGKLLLSGPSDTAGLKALIDLLKSRGVGTTIVDGALSRLSLASPAVTEAMILATGAAVAGNIPELVRKTKYVYELIGIEEIEKALRTRLAPLTQGVWAVSDGGEPIDLELPSVLMLERSGENLFRHGRRIYATGIVTDKLFQLLRTQQREVELIIRDFTRVFASPEAFYAFLRRGHRIRVVHRSRLLAVTVNPTAPSGLVLDSRQLCEAMQEALQIPVYDVKKMPEMTPLTPAMSRRKEFFPEVTDQQWNDWHWQVKNRIETVDELKKYIKLTAEEEEGIRESLKTLRMAITPYYLTLIDPENPHCPIRKQAIPTVEELKRSPADLEDPLHEDSDSPVPGLTHRYPDRVLFLITDMCSMYCRHCTRRRFAGQHDCATPEKQIDDCIDYIARTPQVRDVLLSGGDALLVSDEKLEYIISRLRAIPHVEIIRIGSRTPVVLPQRITPELVNMLKKYHPIWLNTHFNHPNEVTPESKQACARLADAGIPLGNQSVLLRGVNDCTHIMKKLVHELVKMRVRPYYIYICDLSLGIGHFRTPVSKGIEIIENLRGHTSGYAVPTFVVDAPGGGGKIPVMPNYVISQAPNRVVLRNYEGVITTYTEPTDYKDECHCEECEKARRKEGVAELLSGGRLSLEPSELSRKTRNHNLMKKGHKYGTHRVISPKGVLPQPADKLDNNMDEIYDNEILIDVQTLNIDSASFTQISNQAGGDKAKIAEIMLDIVEKQGKHRNPVTGSGGMLLGTVEKIGDALVGKTDLKVGDKIATLVSLSLTPLRIDKIKEIRPDVDQVDIDGKAILFESGIYAKIPSDLPEKLVMSALDVAGAPAQVAKLVRPGNTVLIIGAAGKSGMLCCYEARKRVGVTGKVIGLCYSPEEKERLDKLGFCHEVVCMDARQPIPVLEKITELTNGEMCDITINNVNVPDTEMTSILCTKNTGIVYFFSMATSFTKAALGAEGVGSDVTMIIGNGYTKGHAEITLQEFRECEPLRKIFTELYAMEKLIITAAICGAEVLKEHNPAVPYTVEECAREAKSAYDAGASIIHLHVRNDDGQPTQDKNRFKQVMDAIRAVCPDVIIQPSTGGAVGMTNDERLQPTELLPEMATLDCGTLNFGGDEIFENTENTIKYFGQKMIERGIKPELEVFDKSMIEMALRLHKKGYIAAPMHFDFVMGVNGGIGGDIRDFVFLRGSIPADATYTVAGVGRYEFPLAALAIIDGGHVRVGFEDNVYLSKGVPAKSNGELVEKVVRMAKEFGREVATPDEARRILGLKKMNSVALSDVAAKPVRTCSPRISGRIGRFLSPALLPAVFASRDAFVSGTGRKLRMEKSMIRLRMSAKDAHYGGNLVDGAHMVHLFGDVATELLIMHDGDEGLFVAYDNVEFLAPVYAGDYIEAVGEIVKVGNTSRKMVFEARKVVAARPDISPSAADVLKEPVVVCRASGTCVVKKEDQRIPESRMKKLISAAEAAGMVKDGMTVMIGGFLGNGSPHAIIDALVESGVKDLTLIVNDTAYPDKGCGRLIAGKQVRKVIVSHIGTNPCTSEQMNSGELEIEFCPQGTLAERVRSGGAGLGGVLTPVGLGTIVAEGKQIINVDGKDYLLEKPLRADVALLGASLADRSGNLVYKGTSQNFNPLMATAADLVIAEVRELVETGAIAPEAVRTPGIFVDYMVAPAKMITFKPITIEDKAEIESFTLPYAPANCDLAFANMFCWQFQFKTAWSVVDGFLVIRFQIGGSDRIGYMQPVGAGDFTPVLRHLEEDILAAGQRLRIIDMTPEGLEKLRSVGHCQFAFASDRNLEDYVYNASDLRDLPGRKYQSKRNHINRFEAEYEYRYEPMTRDHAAECMRLEAEWRKTRSGHTGELSAEQRAMQRAFAHFDRLGLIGGCIYVGDKLVAFTYGSPINDHTFCVHVEKADTEYDGAFTIINREFVAHLPEQYTLIDREEDLGIPGLRQAKLSYHPAFLEKKYTALCLYPDEIACKRLWIKCFEDEETFIDSFLIGHYSRKRMLAAEEDGRLAAMLHLIPFESELGRTTYIYGVATDPDYRGRGLASGLMREAMRRIAEEGADAAILIPSQESLKDFYAPFGFEDRSLPVVFEAPDDFDFGSGNQEQDRAMVWRRDNSAPLPERLHCRLLMLLRRIVLLYIVLLLCRIVFYCYNYALIGPLGWQEVLTLAGGGLKFDTVSVLYANLLFIVLSLLPFHFRERSWYRRILFWYYAVINSLLIVAVNLADCVYFRYTQKRFTADEIFFADNSNSVQLVLKFAAENWYLLLVGAVLIWLLVWGYGRKITPRSPLREGWVYHSVNTGLLVIAILLGIAGMRGGVTRMTRPITLSNATLYASTSEKANLILSNPFCILRTIGSGGSVKYTRYFSPEKLDEYFTPTHRPDSSAVNLEGRNVMVFILESMSAEHSAYLKPELYGNGTQPGYTPFLDSLMRQSLCFGQMYANGTRSIQAMPAVLGSIPSFKQPFVLMPQSLGKSRQLPQILRDKGYRTAFFCGSERGSMGFGAYARSASIERLLSREDYEAVHGTGDFDGYWGIWDEPFLQFTGEELSKMQEPFFATLFTLSSHHPFVVPEQYRNVLPEGTTKIHKPAAYEDLAFRNFYRRFEHEEWFQRTIFVFVADHVSSEKMAEETRSYPGNYHIVGFIHTPDGALAPQFLAQTVQQIDIMPTLLGLLGNREPYFAFGRDILNEPDREPWAVMYDSEFRVVTDEALFSFDEERMTGATFRNGTSDREQTASVENRLKALIQQYYGHVEAKNYTVEDNLMKPEYKPFVDALIELAIREDIGDGDHTSLCCIPATEKGRMRLLCKQEGILAGIEIAQLVLRRLDPEMQFEQILRDGDRVKPGDVAFYVSGRLQSLLQAERILLNIMQRMSGVATQTAVYADKIKDLHTKVLDTRKTTPGMRVLDKMAVKIGGGENHRMGLFDMILLKDNHIDFAGGIRPAIEGAKAYLKAKGKNIPIECEVRSLEDIDEVFAAGGVDRIMFDNFTPELTRQAVAKVAGRCETESSGGITLDTLREYAETGVDFISVGALTHQIKSLDMSLKACMYAYKIKQFLLAFALGMTVSSPWDGCFNANGGYIVVKKDGDVIGCIHFMKKFFTFLLPFSLLASAALSSCSDGCTGDPDPTPELPDGYTYATENTSINDGTVTANMLFFGTSTVTTVASGATFTDGKALFELVADGEGKVRILMHETRFAAEMPALEMEVPGISYTGEEKTIDLSAASVTPEIKGTPFAKYVITNLTGEAARTELTVTFTCAGAFDVSYQGRLIIEKMIRQAIHIIFLSACILLHAMSVCAAPALPEDSTPALADSVIQVEDIQVTAIKQGLNLRNQPVTASVIGRTDLERRHVAALKEVSQVVPNFHIPDYGSRMTSSIYIRGLGARIDQPVMGLNIDNIPYLNKDAYDFDLTDIERIEVLRGPQSTLFGRNTMGGVINVYTLSPFTFEGVRLGMEYGSGNTQKYRISTYYKTSERVGFSVGAYYSKTDGFFKNLYTGEKCDWERSGGGRFKVQYRNLHGLRIDNTFSFVKLEQGGYPYAYAETGQIAYNDPSDYRRTNFNDGLTIRYEGEKFSVASITSYQYLDDRMNLDQDFLPLSYFTLTQARREHAVTEDLVFRSPDDKAYRWLLGAFGFYRHTTMHAPVLFKEDGIRNLILDRFEPQGIHAEWGEDTFLLDSRFRTPDYGAALYHESTYDAGRWRFTAGLRVDFEASKLHYRSYAEATYTTQTPDGTSYPHAILVDQPGTLKQSFTEILPKISVLYRMGSSRRNTLYATVSKGYKAGGFNTQMFSDVLQQQVMKQMGFGSLYDVADVVTYKPEKSWNYEVGAHLSTPSHKVQADLALFYIDCRDQQLTVFPEGQVTGRLMTNAGRTRSFGGEASLLATLWRNLDLQVAYGYTRATFVKFDTGKADYAGNFIPYAPQHTLYAGASYTLRTGWNWLEYVIFRVAANGAGRIYWNEANTFSQPFYALLEASIRFEHRHWAVDVWGRNLTDTRYDTFYFMSIGNSFLQRGRPRTFGVSLSITLMDRLADHRIVSNGKNGADRRVRRFSPISPERRVRFYRDCSGTKERYSDRFCNPHLMSCPPTKPAIAVITPNILIGLGLRTILEKVGPPGEIAVFDSFTEFIASGPERYFHYFAAMQVFMRHRTFFLENSHKTILLGKGYSAQFARMRQIDIFGGEERLVHDLLCLRSEAPRPDHALPRQNGAPAANLLSVRETEVLTLIAQGLLNKQIADRLQIGLTTVISHRRNIMQKLGVQSVAALVICAVSMGYVDESDIRTPHKMNIELIVIGKTDSKEIESLLAMYARRINFYCRFAVTVLPDVKNTKNLSAKQQRTTEGASLLRQFGDGDYVVLLDERGDEYRSIDFAYWLQKRMASGIRRLVMVIGGPYGFSDEVYARADTKLSLSKMTFSHQIVRAIFAEQIYRAFTILNNEPYHHEMKRIFLAIAVLCYTGAVYGQDGGRIHRSEFVPFDTREDADALNRKNTDKYLVFAPELLNDGEEVLGIGNVVNLPNGWFDSFIYLHLENTGTAYTLRVNDRTVAVVEDPFAPADFDLTPYVKQGDNLILLELHESNTPELQKGFTPTPVKPFTNSYLFAQEKRSIRDFNVALIPDSTRKFGVLDLEVIVQNGYNYEEPITVGFDIYAPNGKLLDFSVNDITVPGRSLDTVRFSPYIYHTYENSWGAKGAAPLYRVMLYTKRKGVFKEYIPLKVGFGKTEMKDGKITRFDKPVTIVSERYNAAADAAATRKELLALKKKGINTIWPNAPQPYWFYNLCDELGLFVIDQANINAPEKRDDRTTGGTPSNDPRLADEYLERVRNMYYRSRNHTCIIGFALGGESGNGYNMYKAYQWLKSVEPSRPVICIDADGEWNTDLEIVPMKSLRIAELLQSPATDAEVVVKGWVRTKRGNKNVAFIALNDGSCVANMQVVVDLAKFDEELLRKVTTGACLRVDGRLVASCGAGQGVEVQAEKIEIYGTADPETYPLQKKGHSLEFLRDIAYLRPRTNTFGAIFRIRHAMAYAIHKYFNDKGFYYLHTPLITASDCEGAGAMFQVTTLDLNNLPKTEEGAVDYSQDFFGRPCSLTVSGQLEGELGALSLGQIYTFGPTFRAENSNTPRHLSEFWMIEPEMAFYELEDNMELAEDFLKYLIRYALENCREDLEFMNKMWDNGLIERLNFVLNHEFKRLDYTEGVEILKASGRKFEFPCDWGCDLQSEHERYLVEEHFKRPVILINYPKQIKAFYMKQNEDGKTVRAMDVLFPKIGEIIGGSEREADYEKLSARVHELGMNEKELWWYLDTRRWGSAPHSGFGLGFERLLLFVTGMGNIRDVIPFPRTPKNAEFMSMINQKQVLSLQQKLSPQQIQMIKLLELPTMQLEQRIKQEIEENIVLEEDDHTPEDEQPQQISVEEYLREDETPSYKSRINNYSKDDKPRQAPLAGGRSLQEYLVEQLGYRNLSEQDMRLAVYLVGSIEEDGYLRRSLEAIADDIAFTQGVDVSVEHLERLLSIIHELEPTGVGARNLQECLLLQLDQENLNTRSRRLARKIVECYFDEFVKKHYEKLMARLQVSEDEFREAIEEITRLSPKPGNLYSEGGADTTPYVTPDFILDYHEGHFDLTLNSGNLPEARINHRYIEMMRGMVDSDGRVKEKDREAIQFVKSKIDSAKWFISAIKQRHDTLMRTMQEILDYQQEYFKDGNKSKLRPMILKDIADRTGLDVSTISRVVNSKYVQTQFGIILLKSLFSEAMQTDSGEEVSSYEIKNILQQCIDEEDKRKPLTDETLMDILNSKGYRIARRTVAKYREMLSIPVARLRKQIMYLRLSKAVSVVLHPFLVPLYMVSLLLLAGTVYSLYPLKVKIYLIWVTLLFTTIIPVLVIALLKSYRKIGDADLSDRKERFIPLLAMIACYTLCAVAIARIPSAQMLSRFMFAGACCVAVCLFVSFYWKISLHMTALGAAVAFIVLINIASGGGLFAAFIAALLAAGALGSARLKLGYHTLSQVAVGFATGFIVAAGVGLFNWMKRTLCLSALFVVCATIAVSGQSMNEKLQQLLGGSHSAKQEEATPPTYPSEEALLGVWTYQAPSIEYKGDDMFASIAVAGLQDQLATHYVKAGLVPGQGTVSFKKRNRLHASMGGHEIDGTYSYDPATGTAAITLIQDGKQATFQGYLSLRGEVLTLQFDAGDALEAVRHSSPEYAANEKMQQIASVMQNYPGIMLGGQLKKMNRFGFLKVAAAVPHVRIADCDYNAQHITELIRKGADRGASIILFPELCITSYTCGDLIQQPALLHAAEQALGYILAQTRELPIVAIVGMPVTYGNALYNCAVVFAQGRIHGVVPKTYIPNYSEFYEARCFMSGEEIGLATIRMCGQDTDFGRNMLFNIGGVKFGVEICEDMWVPAAPSLHQAVDGAQILFNLSASPEVLGKHNYLLTLVKSQSARTQSAYIYCSAGYGESSTDLVFGGNGLIVESGRMLRRTERFSTEEQLIVADIDTEKLLNSRRRTTTFAPHRPAERIIVEIPLPENPANVTLDREFSSHPFVPQTPEEMDESGREIINIQTMGLAQRLQHTDCKKVVIGVSGGLDSTLALLIAVRTFDRLGLDRKGIIGVTMPGFGTSNRTYRNSIALMRCLGITSREISIRKACEQHFADIGLNPEEQSSAYENAQARERTQILMDIANMEHGMVLGTGDLSELALGWATYNGDQMSMYGLNASLPKTLIQVLLRWMAQVCQDDAIREILLDVVATPISPELLPSSEEGGIAQHTEKLVGPYELHDFFLYHFIQNGYSPAKILFAAEKAFDGRYDRATILRWMRVFFQRFFSQQFKRSAMPDGPKVGIISLSPRGDWRMPSDATASLWLREIDLLIQEKMPSEKNAKKQTESFSDTRTVRRCSIRFGTENEKNKPAKIVMELKDRFLKYVSFDTQSDESSETFPSTAKQRVLLDYLAEEMKALGLTEVTVDKYGYAMGTIPATPGCEKAPVIGFIAHVDTAPDMSGADVKPHVIENYDGKDIRLNAGVTMKVADFPELSFFKGHTLIHTDGTTLLGADDKAGVAEIMTAAEYLLAHPELRHGKIRIGFTPDEEIGRGVDFFDVKAFGADFAYTMDGGFEGELEYENFNAASAKIEIQGRNVHPGYAKDKMINAIQVACELNALLPAWERPEHTEGYDGFYHCIALNGTVDQAQISYIVRDHDSARFEARKNYMQECVDLLVRKYGEGVLTLTLKDSYYNMRKMVEPHPQVIDKAIEAMKMAGVEPLVKPIRGGTDGARLSFMGLPCPNIFTGGMNFHGRYEYCSLTTMHKAMQVILNLAQLWTKMEQTKPSQSLPDNAYRELKPGEEYVPMMPADAKPKEVTPYSVTMGLLMAVLFSAAAAYLGLRIGQVFEAAIPIAIIAVGVGNMLGKKNMLGQNVIIQSIGASSGIIVAGAIFTLPALYILGLETAFYKVFLSSVLGGILGIVLLIPFRKYFVKEMHGKYPFPEATATTEVLVSGEKGGNQAKLLAVAGLVGGLYDFAASTFGLWTEEISTRMTAWGTLCADKFKTLLKVNTSAAVLGLGYIIGLKYSAIIAAGSFLIWLLVVPVVGSTATGAGMSPEELYQTFGRPLGIGGIAMAGLIGIIRQSGIIKQAMGLAVSEFSGKKKAETNVPRTQRDLTMRTILTTLIAALATTFFFFQFGILGNWGQTAVALLIVFVISFLFTTVAANAIAIVGSNPVSGMTLMTLILASLVLVSIGLNGTAGMTAALIIGGVVCTALSTAGGFITDLKIGYWIGTTPKKQESWKFLGVFVSAATVAGVMIILNKTYGFGPGSPLEAPQANAMAAVIQPLMQGGTAPWVLYFCGAVLALVLTGIGIPALPFALGMFLPLQLNLPLLIGGLIAWFVSTRSKDQALNKARMSQGTLIASGFIAGGALMGVVGAILKFADVDWKLTQWNSSNAASWVGLGMYLALIIYFAVHSLRAKKEEMTFCRHGETSAPPRGFRAIACRPGDNHLFDDRDRKMPRQYELPHFMKTFRYLIAGLLLLAALPSQSKEEEISVSRSWGKLSGTLTVPDEGSDAAVLIIAGSGPTDRNGNSGSGLITNTYYMLARALEKEGIASLRYDKQGIGGSRYQDPELYKQEDRLRLADYIADAEALTDYLKERGFRKIILAGHSEGSLVALVAATESPDVAAVISLAGAGYPIDEILQLQLTRELISYNPGLILNVQSILSRLKQGKTTEDIPAILQGIFRPSAQPYLISWMQYDPREVIRQVKQPVLIVNGDNDIQISADNAEALAQARPDADKVIIEGMTHLLKQSEVTDPQRQKTTIYMDAAAPVSEKLVTVMADFIRRIMPLAGFPIDKRSALLLDKENMTKYSISPMSSLYELYLRHPRISTDSRRIEPDSVFFALRGASFDGNRFAADALEKGAAYAVVDDPSLPNTRPDKADRLIVVDDALQTLQALAREHRRELGLPILAITGSNGKTTTKELVSRVLAEKYEVYATRGNLNNHIGVPLTLLAMTRDVEFGIVEMGASACGEIALLCSIAEPNYGIVTNIGRAHLEGFGGPEGVRRGKGELYDWLARTGGRVFVPANDPVLMSMAAERETLAAECYPTTLADGVEHHLEGDYNRFNVAAAVAVGRYFGVDDERIRYAVGSYRPDNHRSQKIRTGQNTLILDCYNANPSSMQASLVNFRQEPLEGCTRKILILGDMLELGDWSDAEHRHIISLAAEIPDARILLVGPHFAKAYRSLESRPADTTLYPSQEVLAAELRKHPVSQALILVKGSHSIGLERLADLLMDKHTYCVIMAGGIGSRFWPKSRQSKPKQFLDILGTGKSFIRMTYERFEKLAPAENFLVVTNARYKDLVLEQIPELGPEQVLCEPVGRNTAPCICYAAYGLQKRDPGAKMIVTPADHLILNEEDFRAIIGECLDFIDDRAALMTVGIKPTRPETGYGYIQVSDDRTISKVKCFTEKPNLELAQTFLQCGEFLWNSGIFVWKVGDIIEAVRTYLPEHHALFSDIQPVLGTSEEAEAIARVFSECRSISIDYGVMEKANNVYVRRGEFGWSDVGTWGSLYQHARKDRYANAKPEKGCYTDENTRSCIVSLPEGKVAVINGLKEYIVVDTEDVLLICPRSEEQNIKKFIDEVKYNEGDKHIMYDSSVSSVKFPWPTNIRISKTYRTIFNFHPRIILAIFVMIRRYYPDAKTIASVLPEAHATINPDTVDDARKLIDIDLGIIDGCFGVAENGAVWIRQDIRHKALYFGATALMILIPRDALVDTMHEALARPELDDFEYGCFMSGPSKTADIEQALVFGAHGPMSITVVLRMALMMVFALSFAACNDDEEQIPPTDGGNLTFEVTVGEITSSSIAYTVTPSDLKAEYLCILADAKTVESFTRDEFLVEAILEELKAEAGAQGKTLAEYMPEIVDKGAITNGKFSNLSPASKYYIILFGVDPANGYKANSDVVKKDVTTEEFQDLNITFEVETTVDGNSATFKITPSNNDDVWYFTTLPKATYDAYTDPAGQYKMETRQFMLFCLQQEIEARRQQGMSDTEIMNAIFHKGALELEGKGLTANTEYINQIAGFIITPEGQVTIATDVTTTTYTTGNAQAQDFTFEITVGEVEAMNAAIKIVPTDETATFCWMVAPWDGQKTATEVMDDIVAQYGNFMNNGAMLYKGVQDYTGGPGSPYKYKLDAADTDYYVIAFGYAGGVTTAPVMETFRSLAAPDPESTTFQITASDISPYGFSAEVTPSETTTYYTVGFMPTEEFKTLDFDQLTADINANFDEMFAMSQMFDPNTTVAQVLSTYYYKGVFTVDASELTPETACSGFVAALSVETGHVVKIHKFENIATTGKLGNINPSIELIGYWSGDDEAGQIFGQPDATRGKAITVVKYSGFNSARKLFALMWYDEMTNVDQYPDASLWSQLKANWLEIDQSQPYSFYVVEWETPQTAFAYAEDNDGNPGTFGRLFTRATAENKGNIQDLIDLVEKLNATSKSSFTLPKSGIIGKNTGITRNDKNIKANTPVANVVKNEVEVVEPKPFASSYNVSYVRPFYLMHKRKIKYIFIFVKDCAISKNVLRINFQEVRKIRYNTMYISAATTANDPQSRFMRVNKFGIVKSRIRICKRISPPINMNLLCGSFAVVAALMYNDLTLAFWLIVAGIVFDFFDGFVARLLHSPSAIGVQLDSLADVITSGLAPAAVLWQVCLQTEPCWLPEAWKLGYGVFVLAAFSALRLAKFNIDETQTVEFCGLPTPAGSLLCASLGMLWQQGMLALSSDGVLLIAVLTSLLLVSPIRMFALKFHGFGWRGNEVRYLFLLASIVLIIILRTYAIPVIIVLYIVVSAVRWLCMHSGNPDKAPKAMFPKVLKKILWILLWGGLLAFPTLEASAQFDASAILRNQNNQNPNDPNNPNNMLGSNPFQTQNGEEQPAMPTDSTKKKRIRKPLESYFFNDSIRALPNFSWTISRDYNQVHINPLDTTLATFRIDYPFYKEGVGHAAVGALGQASLPYNYFERPQYRNFSFAEGFDVYTYRMENVPFYNLKRPYFHFMYLESGQKKFREENFSLTLGHNISPTTGFNVNYRSRGTKGLYEWSRTKNHNLSVAVSHTGKRYSVHAGFINNHIETRENGGVVGEWAIRDTTFEMPSGVPMKLTSSEATNTYRNNAFFVEQSYGIPLLPVTESDFSIANLPAVFIGHSFEYNSWSKVYKDIRGTYTDDRYERDADGNFVPQDGLEYYKNWFINPTQTRDSIYERVISNRVFIQAQPWDRNGVVGTVNGGVGLDLHTYSQFRLDSYLNGKYDKVGKSSYFVYGSVEGKIKKYVDWGADAKFYPSGYRGGDVSFGANLTLTGYIRKRPLILEGRFRMETRSPDYWQENLFSNHYVWLTPLRKENETRFEVAFRVPDYAFEVGVWQGIVTDKIYYGADSQITQDNGTVSVTSVYARKDFRIAGLHLDHKVLLQWSTNHSVIPVPLVSAFLSYYYEFWAVRDVLRVQFGVDGHFNTRYYAPGYNPALSEFFNQREIEVGNYPYMDLFLMGKWKRMRIFLKYQHINRGLFGNGEYFAIAKYPLNPGMFKMGISWGFYDMLKKTCLIFVFLTLQTTFYGFNADFSTSSEAGITLEEKMEARYVISPYDHVIRNISEREGNDWRLMSAIAYHESRFKADIVSRRGARGLMQIMPAVARQFDVASEEALLDPETNVLLANKVWNRIDSTLDLPAGISEKDRMSLILACYNGGIGHVNDARRLARVNGEDPNSWEVVLRYLELKSDPAYYQHEVVKCGKFTGYRQTRAFVQDVMNRYNKYCRITQLMMKHLRHILIGILLLLTSCIENSIPYPVVTLQILGVEGEGFTCAPEDINTQERIVTLHLDEQTDISNVKIDKISVTENARSSKPLSGTFDLRTPLYITLSFYQDYEWTIVADQKIERYFEVESQIGAAEIDVDQLTAKAYVPEGTDLSDLKVTRLKLGPADITTMTPPIDELTSFESVRYVYVAYHDFEEKWSLYVEATDTKVRFTQVDAWSGVIWAYAEGNSADELGFRYRKTGDEAWTEVDKKQINISGGAFDTCITGLTPETQYEVVAYSGSNETEVASVTTEAAPQLPNGGFEEWETIDKVVYPYLADGIHFWNSGNKGASIGNATPTDKTTDVRPGTSGIYAAQLSSKLAGLVGVYKLAAGNLFTGIFYGIRNLTHGIVCFGQPFEARPTALHGWFKYNQGMLTNVGSTQPPGMNLKVGDPDNGMIYIAVGTWTPEEYGISQGEQFGSAENPIAIDTRNPSSFFDPTSPAVIGYGQLPLTASYSEWQEFTIPLKYVATDRKPTHIVVVCSASRWGDYFIGSTSSVLVVDDLELIYDRLDKTGEMKRLIFTILIAVATVSMLRAQEPTSLEAIPSSRLQDSLYATPVPTTVPVIEELPAPTFYADLSDSSASMPTSVSPVRRKQRFLPMKRRIDREINKIKFAYAGEIALGLTVSYGTLSSDDTDYLLILDNLNLNGSIFTINPSVGYFFKDNMSAGVRFGYTNINGTLDTGNFNLGEQNDVNLAFKNLHLQSSALSVGLYFRSYAGLDSKGHFGLFGEVDLSMKTGNSEFTYETEGTLRSTFSDDLKLSLGFNPGLAVYIFPNVCSTISFGLGGIEYTKIKQKDADGNEIGQRTASKMRFRLNLLNIRIGVTVHLWNKKANKAMIFMRGTVAILTLTLSLCLCFASNQSQAAPGPAIDSAIPQPDSSETVNTGSESPRPEHPLRTDAQSPAPMESAPERKADPRAERGLTSMSNQFVPRGQWIFGASASYSTHTNKDYTFLVIEDINSDGYTFKVTPLIAYAIRDNMAIGVKFIYSRSLLRIDSGSIKLGSDIDLGVDFYNALQHNYSGAFIWRQYIPLGQNKRFALFNETSLTLGGGQSRFAADSPIRGTYETNFSASIGISPGLVAFATNNVAFEVNVGVMGLSYTRTRQVHNQVTVGKRTSSLMNFKVNILSIGLGISLYLMKKILKYISLLAGVAFLTAACSQSDIDGNASEEMGTLRLSVNIGGSRADAYNALDRSIMRVYKIENGEEKLIRKYQPATEAPGDFYLVAGSYRIKVEAGDQSQATFTNKSYYGELDVDIEPQQTVLKEVVCPTTNIGVKVVFDQTILDKMDPGFKAYVSAIDTFSKTEAENGSVPTLKYTENATGYYLLPEDVHNLSWGFYSSSTELGSVSKTGVIPTPESGNLYTLTFKYSKTPNGYLGITVQVDQDGEIHEDPFIFSPQPTIKGDGFDINSVIGFNTDDISFAVSSVQALSGISIKANDETIQVLSDGALLPEAAAKGISYTKTDDNSGKLSLGGTFFSTFAGGIHEVEFTMTDVAQAEGTGKARIATPGLTDLAVYDLWLNTADFQVIVTDPALTNVKVRYRERERLAESPAFGEWKTVTAVAGADYTYTAQAIDFAADRDYEYQLLINDAETGEIHNFSAATGIQLPNAGFETWTNSKTWYPCSADEIGSNGMGTGYTGFWGTGNPGANAAGIVVTEPADDPRPGSTGSKSALLKTQSAFGVIAAGNLFIGAFGGVHNITKGDVYMGRPFTFNARPKAITFWYKGTVGSGDKARFFVCMGKWSSYHKIDTNDQSTFFDPSQESLPEGPIYGHGDWLNDTSQSDWKKIVIPIKYRSDEKPNYLMVTASASYRGDYMEGNKESRMYIDDIEFVYMKTFTKYLLLPLCCLFMAAGCGKDDLPTGEQPEGPGSETGILSFENWDLTVADDMEILPTDNAPGTSSTRSTVDAPDDYIVKIYNSKKEQVGSYTYAEIKTTGNIELPQDSYTVTAESPNYASTPDVAWETPVYYGEISVNVIKKLTTTVNNLVCKLGNIKATVGLSADLDSLFKPDDETDKLTVTLSIQDNSLVYGRPEATGETLKPGFFRAVDTDNTLKIVLSGQYNKAGEGEPASYVPVNWSQEIQNVKAGQWRKINIKILHASDGNVQFQVTVETWVYDEKIDVDVMSSFYSYGEEEIPDEEISDENSPAVTLENGDIAQPYPITTSMFDFDVQSCSPMITAVVTPYQGSTVASLEVVFDSDNAQFLEALATAGYSNNTVALWPGENPAGDYCVVKQSGSDLLVKVNYNGMKGLYDHTGTHTAKFIAIDSEGRRSYTTMTIKVTHDSGTAEGPNIFWSTNPEGTDIVDIDSRHTLTEEGMNVFINLASESGITGLTVDIISDALTAEVLESLGIGLEAHMDLVNPASDKMDEGLHSLGFKTKDEIVGQKTLQFDISQFMTMLYAVAPGNTDFKLTATDASGQNIKSIMLYVPQQMKKYLLILTTLALLGGGCSKEEIPETTDGEGSVEFRTTTCSEVDSQTTRAQTSLPDNCKPSGNSFKLVVKGKEGTATAEYLAEYTTLSEYTAPFMPSGDYTATISYGDPQQEGSTAFCYQGALDFTILARKTIQKTITASLTNSVISLECGEWFKKYYSEAQFTVQTEAGNNFSFTHSSSPDTPIFVKPGSKLLLKGTAVKAQNGVKVEFPQQQIGVTTARTWHKIRIDASQAGQGSISIRLDDTLTEVPPQEIELNPEAMNCMMAKRHRILLSVLALFLIGACSRNEEIEQQTSPSGGVEVAILCDNTKEPQIYSLPDGTRTWIDDNDWASTRWDKNDKIALWATADGSNYTLNAQHFSLAYFTPSYSTAVFSSTVADMPAGTYTYTAVSPVPESVSGTQVSYQIPAEQTGRYEGKWDILAADPLTADALPLFEQSDQMLETPPSHALRFRHKCHALRIEVPAGRNIWGEPITRLVIDFPTEVVGTVSFDAADPSAPMSLAEGSKSITLDLATPLTDEAENYAWAFINPTTMSGDISFTAYTANGYRSHTLSVSINREMAAGHITPITLTIPTELPVSYVDFSVTGDSSNLGEEPYNLIIKAPEGMTFRNGTTEQTFPIDESNKYTVAFYGDLYGDLLAQQPLQVSFETESAIVPQNVSVASFTPGEHLPIALKIPYLLSEDFDDKTDFEYKTEATTSNPDGISLSQYGFDEGWTGTRLQVSQKAMRISVRHETAAQYPGRLDTPPLACIKPGKTVKLKVTFNANKDNNYLYCSFGTLTDTAPKKGNDGLENTLKEQIDNLNTLSGVSFGNIQGLCTCEVPAATNTTRLSWLIQRTYNFTGNGWISRTWYMYLDNIRVTIVKMNRIINTLALATAGLALLCGCSADPSTDESAPGGSDGKTVPVSFAAELPATRATIEIGDDRFNGAWEVDIDKLGIHATLNGIAQVNKPFVFSSEGIFKGELTPGTGAWTYLAYYPHGEQSLNGTSATIPFGNTRIQKGGTYNSLFDILVAPAQTTANSAEGVDDSGERIRFNMQRLTSILDFDLTNSTSDPIRCVLLTAESDDFLSAKSLNFDLAQGEAAAPALDTEERSKSILINFDGGSASAAAQLDAFFNVLPGNYNLNLDIITATKQMASVKIDRTDKPFEAGVLYKKEVGTLTPSAIPAPSLDWPDQDIDATHEITVGPDQSLTYPAAIDITVPGGIAELKVEIVSDALNSLGIQNLDLVHETSIAGSIQYKDLGLKCGTEIQYTKSTVFDITKLVPMIAMLPDAIGNHVFKVSVTDLAGQTTVQDLTFHYGQVTLETADLWQNTATLKIVPSATAASATLEYKRSTDDAWQQATVSDNGDGTFTAAIEPTWSSSTNEMGKTVYEPDYATGVFAGTTYDYRLKLDGTEKETGRFTTAKGDVIPNADMSEWSTVSRAGLSGSKDVPYPNKTGDSFWDCGNNGITTDLCSSTTDKFGAAVPAAKLQSKNMFVLAAGNLFTGSFNYASMTGTVKFGSKYTYTARPKALRVKYHATTGDIDIVRSQNPAPGVAKGDPDKCRIFVAIVDWSQPHTVVSGTGSTTGAWDPANGADVVSEAGKVVGYGSMWIDQSTPGDALVSSEDALKIHWYEEKAPSPTGNYTIVISCAANAYGDYMTGYSKACLYVDDFEWVYMETIKTLRSYVAPTIGVMDIRIKRGFGDSFPGGTVEPMSYNDATNDSYMKNLFLFMAITLVGLGGCSEKRSQPLAIDNSLTQEEIAAGVLSPEVMWKMGRVGLASLSPDASRLLYTVTWYNMQENRGVTAIYVRDAASGEVAQLTDFSSNNSDPKWNADGSKIYFLSDRSGSSQIWEMAADGQNPRQLSKLDKDIEGFGVNPAGDKVFYVQGVQVADRKSSDIHPDMAESKARVYDDLMCRHWDRWDEGEYRHIFIAELTSGGIGKGVDIIGEGAEWDTPLAPYFDMSEIAWAPDGTRLAYTCKPLTGAKYAVSTDSDIFVYDTETGATTNICKGLTPISGHDAAAKTELPFVGYDKYPVFSPDGTKIAFRSQRRAGNEADKERLMVWNSETGLVKELTKNFDYNATNVIWDGSEALWFLAPMEATHQLCRVDMNGNVSVLTRGDHDINAVSIANGKAVADICTISSPSELYEIDLKDGAITQLTFINQPILDKIRLGKVEKRWVETTDGKQMLTWVILPPDFDPAKKYPTLLYCEGGPQSVVSQFWSYRWNFQLMAANGYIVVAPNRRGVPSFGQEWLDQISGDYSGQNIRDYLSAIDDVAKEPWVDKDRLGCVGASYGGYSVYFLAGHHDGRFKAFISHCGIFDFEAMYGSTEELFFLNNDYGGPYWDKQNATAMRTYANSPHKFVDKWDTPIMIITGELDFRIPYTQSLEAFTAARLHGIDARLVEFEDEDHQVMKPQNSVVWNREFFGWLDKYLKKMRIYLYFADKTLIFTDETSPARFFAVDLPQGGRISRTKILNFLETHNEVAVCTPDPEQAFSLFRQEFAAVEAAGGVVVNDRGEYLMIHRNGRWDLPKGHVEPGESTAECAVREVAEETGAVGAEVVRFLCRTLHAYYMHGRWELKATHWFEMRVSSSRALKPQREEGIDVAAWCPAAELKDRLEGMFPTVRRVFECLEKMEKYESKHQQILRSAEQIYTVISRFDNLTPAVQDKVEEWQADENSCSFKVKGFTVNLQIVAKEAPKYVKIQSGEGGVPIDFTFWIQLQPAGPYDTRMRLVLHAELNMMMRMMIGGKLQKALDQIAEAMAKAMNGSAMMSFFANFSLFPGDRFSKPLFFGAKDSENWEKTGSCSRFSEAHPIMIQPGSNDRLPKRISGVVSFPTPQRETGRSREPAGQIRLATLYHPCSKMQTIHIDSLDELPHAAAAVINALEGRSVVVFRGEMGAGKTTLIREIVARLGADDTVTSPTFAIVNQYTTREGKNIYHFDFYRINRLEEAYDFGYEEYFYSGNLCLVEWPEKIEELLPEEVMTVRIAVGDDEERTIEIDMVKILWVDDEIELLKPHVLFLRGKGYEVDTCNNGYDAIDMATEGNYDLIILDEMMPGMTGLETLPKIKEIRPTTPVIMVTKSEEENIMDKAVGSKIADYLIKPVNPNQVLLSIKKNVHSQQLVTEQTTADYRAEFGRLSSALQMADSFADWCNVYRRITNWEIELSDSTDQSIKEVIEYQKHEANQEFCKFVRRNYYDWINKRDETTPVMSHTLMRSKIFPVADENPKTTLLLIDNFRYDQWRSISPLLRGYYDIAADDFYCAILPTATQYARNAIFAGLMPLAIDKLMPNKWLNDNEEGGKNQYEEQFLQRLMTSSGKNYKYTFDKLVRPEAGRKLIDNIQRIYDADFSVIVYNFLDILSHARTETDIIRELTEDEASFRSLTRSWFEHSDLLTLLRLLSERGHTVIITSDHGTIRIDNPVKVTGDRETSANLRYKTGRNLAYNSREVYEITRPEDIQLPSINLSSSYIFAYNTDFLVYNNDANRYIRYYRNTYQHGGISMEEMLVPYIVLKPKQMILPIIQCEFRAIYCARRTKLSGGGVRFRLSGCLIMRCLFPDILRYGPAPVGPPGIEARFYGPVFEMTKADIVSEIAKSTGAEKVQVQAIVEAFMESIKGSLAQNNNVYLRGFGSFIVKKRAKKVARNISKNTTITIPAHNIPAFKPAKSFAAKVKMPNGKKHKRHKMATHKRKKRLRKNRHKKKMAFRERIRYTVIRSQTHRPLLPDDPTHPALRTERESENRMNRELIVNVNPTEISIALCEDKVLVELNKEQCQTGFAVGDIYLGKVRKIMPGLNAAFVNIGHEKDAFIHYLDLGSQFSSLQKLVASYQPGKRGIRLDAMKLEPPIEKSGKIGSYLQVGQTVMVQVAKEAISTKGPRLTADISLAGRNVVLVPFSSKVFLSQKIRSAEEKKRLKGIAAAVLPKNFGVIIRTAAVEAKDSDIEQDIRSLLDKWQKTLQNIRKNPAPAQLMSEMNRANTIIRDSLGGAFSQIVVDDEAMYHEIQNYIRQIEPQSEKLVKLYKGNVPIFDNFDISKQIKSLFAKYVSLRRGAYLIIEHTEAMNVIDVNSGNRTKAEDDQEQTAFDVNLAAAREIARQLRLRDLGGIVIIDFIDMHKAANRQLLYEEMNKLMATDKAKHTVLPLTKFGLMQITRQRVRPVAVQDVTDVCPTCNGTGRIEPTVLLDKKIENKISYLAQDAGHKYIKLRVSPYVSTYLNHGLWSLRRRWMWKYKIQLKIVADQSVGIVDVHYYDKEGKDLYKDMERHTCSVAGTICSRYEYTELNNRLSALRNRFLQGIFMGPGNKPNILQLIAGAEPLGAMRRAYDSAGRTVLLRDMVGGALSVYAAALIARTGGTHVFVAEDRDAAAYLLNDFYALLDEKQVYFFPGSYKRSIVYGTEDAQGVVQRTAALSALRREMAAGEYRIICTYPEALAERVTDPDSMRRETVRVKVGDRLAIGELEELLADSGFTKVDFVYEPGQYSLRGGIFDVFSFSESKPYRLDFFGEEVDSIRRFEISSQLSADRLNEVEIVPNLNGFAGDRISLLAFAGEATYWFFDPDYVLRRVNDLRRKVLGEMEEPAEIDTHLVSRKVLLQDMAGMRLFELRDSLKERPADATVAFRMAPQPKFNKNFELLADDIISNGQRGYKTYILSENRAQLERLENIFYQSGRKEAQINPLPITLHEGFVDHDLKLCFYTDHQIFDRYQRYRINGEIKRDEQMTVAELNQLRMGDYVVHIDHGVGRFGGLVKINENGKVHEAIKLIYKDNDVLFVHVHALHRISRYKSGEGEAPKIYKLGSGAWQKLKTATKKAVKDISRELIALYAKRKASKGFAFSPDTYLQQELEASFMWEDTPDQQTATQAVKRDMESNQPMDRLICGDVGFGKTEVAIRAAFKAATDGKQVAVLVPTTILALQHYRSFVHRLRDFPVKVEYLNRTKSSKETSRILSELAEGRIDILIGTHKILGKQVKFHDLGLLIIDEEQKFGVAAKEKLTQMSVNVDTLTLTATPIPRTLQFSLMGSRDLSVISTPPPNRQPIITESHLFSEEIIRDAVNAELDRGGQVYFVHNRVEDLMTLQGMVTRLCPRARVGIGHGKMPAEQLEKLIMDFIYGEFDVLISTTIVENGIDIPNANTIIVNNAQNFGLSDLHQLRGRVGRGSQRGYCYLLSPGDELLTPDARRRLRAIEEFSDLGSGFNIAMQDLDIRGAGNLLGAEQSGFIADIGFETYQKIMQEAIAELRSEGLEMPGMSDAEQGVVDKMSYISDSVIEIDVEAELPDSYVQQPAEKLRLYRELDTARNEEMLKSFEAKMIDRFGPLPRPAAELLNVVRLRWEAVRLGMERVKVKNGLMIVHFVGDDDSPYYKSDTFMELLRKVTQRPDRFVLKQHNNRLAMTVRGIKDVAAGYEVLKSLMNLTIDMGNTRVKYAVFDGGTVVSDGCSEEFDEAVIDRILAAHPGITQAIVATTRGPVDDTVALVRRRIGRCLRLSPQLPLPIRNGYTTPETLGEDRLAAAVGAASLYPGRNLLIVDFGTAITIDQVSADGVFRGGNISPGVQMRFRALHDYTAALPLCESCEDQTLLGRSTVEAIRQGVMNGIAFEIEGYIARLFPEIDALSIIFTGGDAKFFVKRIKNTIFAHCDLVFLGLNRILEYNASEESRRMQVKKAAVKLCLALAVIVPCMAWGQTSSINAFSPYSMYGLGELRTPGTLQTRSMGGVGVGMRNAAAVNLLNPAAYSAVRPKSFLFDFGLEGQCFYNSQKYYGQTLNTSYYTVNFHDIAFQLPIAKHLGLGFSLTPYSSVGYRMKQEVDDDEIWGNIGRVQYQWDGDGDVTEVKLGLGWEIFRGFSIGIAAQYYWGDIQRIYKTAILENITGGGLIADATGTETYSVSRFKGQFGVQWSPISNRRRILTIGATYDIGGDLNPNVTTKVQTGDIFNTVAMDMGNRLGLKLPQQVAVGIYYNTPKIAVGADYVYQDWRSGNSRLVEKSAAGFDVAYRNTNTVKLGVEYTPNKADVRSALKRWSYRAGVRYGTYNQTFGGVDVNEYAVTLGVGIPLTVLGGILGASSVDLGVEVGGRGSFKAINEQVSLVKQTYCKFSLGVTLFGDYWFVRPKYDMNRMKILLSAVLVFAATASIAQDFSDPRYAPWGDTPEQRKQNILTSNLLKEAVDTRDYDAAAVYFRTLAQEAPSAFEATFIRGAQVYSNKVQRAQDLNEKKALLDSLMMIYDLRVQYFPSSPNYGTAYVLDRKAREYLTFNPSDREGVRKLYKEAIEAGLQSGYAALPDVALVYFSNLCDDYKMGEVYPDAVLDEYARLAPIFESDAPGVKEAKTQFDTCFAGSGAADCENLEKMFRPRIEAAPEDMELLKQTVSLMSRSQCSSEFFLQIAEKYYAMEPSAQTAMMLAQGFQERGDFAKSTTYLREAIAAEQDAVQKELLLVRLSMTELAAKNPTAAAVAANEAKALNPNNGMAYFALAQAYAASAASCSGLEGQAIFWVAYDTMTQAANLLANDADAGNFAQTARDAAANYRRGFPTAEECFFNELMEGARYTITCGPARGIVTTVRPRMLRSIQRYAQVALLIAGSAILLYSCDKESVAEEPNDEALMTEYSEHLTMTNTENGRKSYVFTAPLVEGYSLAKEPYQEFRKGVDIVTYQKDSTGAVDATLTANYAIHYGNRKLWEAKGNVVVKKSNGQELYTQQLFWNEKTRRIWSNVDSKIVEESGNSYIVEGFESDDQLKDWKFRRIKGRMWVNIEPTRDADSTSVKPVADNVSAAKEAVSEQPVKPARPIRGNDRKIQLTPVESNDRSLMITSVFIILLMLLLSAFFSGMEIAFTSKNRLKLEIDRKQSRLFNFIADIFARHPGQYITTILVGNNIALVIYSLYMSLLLRSLAAAVGWTEIARGGSVVLETAVSTIIIIFVAEFLPKSVFRNSPNFYYRLFAPAIYFFYLLLFPIAKLTTWISQGILWLMGRKPKVAMMEPIFDRTDLASLFESGKPEAQHEPDNEIKLFQNALDFADLRVRDCMVPRIDMEAVDIDDTSIKALTARFVESKYSRIFVWKESVDNIVGYVNSKSLFRHPTSIDEVLMEVQYVPETMPLQALMQRLIRHKSNIAVVIDEFGGTAGIISLEDVLEQIFGEIEDEHDVPDLTEKQVGDSEFVLSCRLEVEYLNEKYGLAIPESDEYETLAGYIIFRYEGLPAAGETVRFEHLEIKILRRTRSRLELARVKRLMFKDNKYILKTMINDQILSSFSASGISKKRTCPSPVENIPMASLNTLRTRFGVVLSIIIAFALLAFILSLKTDMGLSGNDPKVGVIDGSKIRYSEYIEVYNNLKDQSNISESNEEQMDQLAEMAWQTLIANHVYLPGFEKMGISVTDAEREGLISGEYYSGTMAAAFTDPRTGQYSVEGVSDFIAQATGNPQMQYMWGALVGQAMREREINKYNGLVKGGVYVNRLEAEEGVDAQNKTFSGSWVGKRYHDMPDSLFSVSDSEIKAYYNSHKARYEQKPSRTLSYVVFEVAPSAEDMATLEKTVREVGDEFAASDDPKAFAKNNRFGKITDNYRSVAQLLDDEAEALANGKQYGPVLKNDTWTMTRVVETLNAPDSVGVRHIVLTYDQRDLADSLMTALRQGADFAQAARTHSLYMQDAGNGGDAGVMPFSAFPDELSGLLSTAKQGDILRVEVGDVIQILQVYRLDKPSKHMRLATITYPVEASSATRRNVHSQASLFSVEGKGSVDAFNEAANKGNLTPREAKLTQGDRLLQGLADSRELVRWAYDAKVGAISEIFPVGDDYVVAVVTEIDNEDYTPIEKVANNIRQTLITDKKFEKIVSEMKGSTIEEVAQNLGTEVVPFEDVRYGSFFIRNMGVEPRVIGAITATEQTNTLSEPVKGNVGAYVFVVTDIQEAETPQSIEAEKVRAEASSQGMIQRRLFDFLEQMSNVEDLRGKYFMADWPDYHSEHLTEENSGNRLLSLLRREVIPLCHRNNDNKKEECISYIPLFRPELFRKKSTGNGMRAKFSDLTYDGGEQKSCCASKGCGQTEPWLTAEQIPVKGSYSAKDLEEMEHLNYAAGIAPFLRGPYSTMYVMRPWTIRQYAGFSTAEESNAFYRRNLAAGQKGLSVAFDLATHRGYDADHPRVVGDVGKAGVSICSVEDMKVLFNGIPLDRMSVSMTMNGAVLPILAFYIVTGLEQGCTLDQLSGTIQNDILKEFMVRNTYIYPPKFSMKIIADIFEYTSKNMPKFNSISISGYHMQEAGATADIELAYTLADGLEYLRAGVAAGMSVDAFAPRLSFFWAIGMNHFMEIAKMRAARMLWAKIVKKFNPKNPKSLALRTHSQTSGWSLTEQDPFNNVARTAIEAMGAALGHTQSLHTNALDEAIALPTDFSARIARNTQIYIQEETNVCREVDPWAGSYYIETLTNEIAHKAWERIEEVEKLGGMAKAIETGIPKMRIEEAAARKQARIDSGIEKIIGVNEYRLDHEAPIDILAVDNTAVRESQIKRLKELRANRDEAAVKKALEAITECVKTGKGNLLELAIEAAKVRASLGEISDACEVVVGRYKAVIRSISGVYSSEVKSDPAFEHAKELVAKFAKKEGRQPRIMIAKLGQDGHDRGAKVVATGYADIGFDVDMGPLFQTPEEAAKQAVENDVHVVGVSSLAAGHLTLVPQIIAELKKLGREDIIVIVGGVIPAQDYDELYRDGAAAIFGPGTPIATAAIKIMEILLDEQKMATTKREKLFTEFPPVSTEQWEEVIKADLKGADYERKLVWKTPEGFNVRPYYRAENLAGLKFLGSEAGVFPYVRGTRAHNRWKIHQTVIVNCPKEANAVALKILNAGVDSIEFQIVPETFSAEDLNTLLKDIHIPAVEITFSGSKTAHVAELVIAKIEKEQLPAEEVHINFCIDPLVKKLTSKGSFCSENGAKCFEKIADLVRKTKTYKGIRVITVSGEIFSNAGSTIVEALAFSLAAGHDYLVRLMDMGFTIEEAAKKIRFSQAITSNYFMEIAKLRAGRMLWANIVKAYNPAKNCPCKMFTHAVTSTWNQTAYDPYVNMLRGTTEAMSASIAGVHSLEVTPFNKAYEDPNEFSMRIARNVELLLKHESHFDQVVDPAGGSYYIENLTDSIANEAWKLFREIEEKGGYTAAYESGFIVERVKASAAAKDKNIATRREILLGANQYPNFTEVAGKELTEAAVTRPVSEGNTLAPYRGSMAFEAMRLHVDRSGKAPKAFMLTCGSLAMARARAQFSCNFFACAGIKVIDNTFFKSIEEGVKAALESKAEIVVVCASDDDYAEAAPKVKELLGDKAILVVAGAPACMPELEAQGIKNFINVKSNVLETLKFYLKEMGIMIRAFPKPPPKRAFVGTNRLFSAFLAYNPAIILYLYGQFKSNMNGAIFRKNAIFRKIMSEIDRYDEFLGCFFGKSCFFIGFFEKYSIFFWKMRFFVRFCRVGYLSLCAERMPSVTRAEVYGFYGIPSSMLVQQEPDASSFPNGGIRNTFEARGYSAWDPTSPAFIVGGTLCIPTVFIAYTGEALDYKVPLLRSISAVNKAATEVCRYFDKEVNRVIQYLGWEQEYFLVDESLWAVRPDLMLTGRTLMGHESAKNQQLEDHYFGAIPTRVIAFMADLEYECLKLGIPVKTRHNEVAPNQFELAPVYEECNLANDHNQLLMTIMDKIARRHNFRVLLHEKPFKGINGSGKHNNWSLGTDTGVNLLSPGKTASENLQFITFLVNVISAGHKHNGLLKAAIMSATNSHRLGANEAPPAIISTFLGTQVSAVLDKLEASRSDSAIRFNAKNVFKMSGISHIPALLRDNTDRNRTSAFAFTGNRFELRAVGSSDNCAEAMIVLNTAVADEFTAFRERVDARIEAGVRKEKAIYEELKSMIRSSRAIRFDGNGYSEEWRAEAARRGLDCETCAPRVFDRYLDPSSVEMFARMGVLSKVELEARTEVKWETYTKKIQIEGRVLGDLTMNHIVPIASRYEALLLDKVYKISQIGQGLDASADVELIKRIQQHTALIQQLTHDMIEARKVANKIEDQREKALAYHDTVAVYFDQIRKHVDRLEEIVDDQMWPLPKYRELLFLRMLRLAASAGGNDNRDNPADSPDYFLTLYASKTSEQNQCKDLCIATMYRNLSEFIARLEREGELQRVSVPVDPVYEIAEITDRMSKQPDGGKALLFEQTGTPFPVLTNMMGSDRRMAMALGVESLDELTRRLDDLLQQAVTPKNSLLDKLRMLPLLAEMSRWLPRTSSSRGECQQVVLQGEEASLDALPVLKCWPCDGGRFVTLPLVHTLDPETGIRNVGMYRLQLFDARTTGMHWHLHKTGARHYEGYRRAGRRMPVSVALGGDPAYTYAATAPMPDNMDEYLLAGFLRRRPVKLVKCITNDIYVPADCDFVIEGYVDPSEPKTVEGPFGDHTGFYSLTDEYPRFHVTAVTRRRDAVYPATLVGIPPQEDAYIAKATEKIFLAPIRLAVQPEVKELTMPVFGTAHNLAVVSIDRRYRGQAHKVAQGLWGAGQMMFNKYLVITGEDCDVHDPDRLAALLRRAEFPRDLIVSEGVYDVLDHATATPGFGGKLAFDLTEIDPSAPAEAVRLPERFELTPGLVEVADGLAGKWGALLLFADDTVEQKPDLAAFLARNPCRGIRYVVLFDGHARTLRPDELLWLAAANTDPRRDVECRDGVLCADARSKRPGIAGNPSRFPNVVTSLPEVVRKVDERWAEYGLGERLESPSDRYRTLLLSDKAAWMAGLFQTRERRALVVFLLLAGVFVAGLLLAERRESAVSADRAEAEMEATVAADSVRLFEFDPNTVEYADLRRLGLTSRMAVSLLKYRAAGKVFRIPEDVATCYGMTDSVYFILEPYIRIGREYALTPSPRREYREYVPQEPRMIVPRERFRIDTVSASYLASLGFSVRQAEAIVRYRDLYEGLRDEAGFRACYMIADSVADLLLPYVIFPEPEPVRSGLIELNGADSATLRSVVGIGEKSVMAIIRYRERLGGFYSVDQLAEVPQVTESNFERIVKQIYCDSFKIRKIDINFAPPSTLKGHPYLPPAVFRKLFSKRQLKGGWSTVEELVEEHILTPREAERLAPYLRFTVREASKDIPNGESASSGWSPAPIQDTIHMIIMPVKEGENIEKALKKFKRKYERTGVLKELRRRQYFTKPSVAKRIAMQHAIYVEKLHRDEEMPAPAQKSSETKITKKISHTTIFYSFQTKKFSFAGETESNPLMEKLTPREEELMRCFWTRGPLFVRELVALWPEPKPHFNTLSTMVRGLEAKGYVGHKAYGGTYQYYPLVSEEEFSRKTLKGVVSKYFDNSYLGVVSSLVREEKISVDDLRDLIRQIESQTEKRMPTFLLYSLKAAGCLAVFYLFYKLLLSRDTLHRMNRVLLCGVLLLSFLLPLCVITVEKELPGVSAAGIDVIPENYFRRDMVFENRIPDDTRDLMITEEPEPAPEPFDWGVLLGIIYFAGVFATLGWTVCNIVRVVRMTRRGQRIPLGNGSVLVLSDRIRAPFSWMRYVVMSEEDYACGGGTILVHEQAHQRLGHSWDLLLVDLLGCLQWFNPAMWLLRVELRAVHEYEADEQVLRCGVDAKDYQMLLIKKAVGGRWYSIANSLNHSNLKNRITMMLRKRSSRWARAKALYVLPLACLALGAFAQTSYVLPEDKTTKNSGNGEMPLPAGADGLTVGTPEGGMPPVEGSMAELLANLERTALEKQTAESGAHTFTGRVFGRDDKPWAGYEFICSGGRRVVTDAEGRFTIVTEKPIVCYLVGGETDQKVKSVGSRFGIPMGTDIALEFHLKESLALTHLPVSDEPVVYAVYGDPADFRFDPEHPPLIMDGGEELSAETLDTYLGLPEQKMIGAWMVKGPEALKGYGTRAANGVLSIRVQTYPYTESWSPADPSLWDPEDLELYLVWEGDELPEQFVARRDAYMKEEFAKLLTADAGKLERLGYKSVDGAEEWVTVEVSDGAALIPFWIDLSDEGLYLLDGEEIDYRQLGAMSPSSIATATRMTSGEARRRYGDRGRYGAIVYTSRPESERVTIEEKQKPSDLYHYITGDFEPTGVPDTYRVRRIEFSHSMPFEFRPLVLWNGKVSNIYLFTTPGIVHEIETVRIVTEPDEATVARYGVSARNGVIEVVSKTASREDDFEVTVYDKYNNPMRYLKGSFRSVDGKNTYKVSGLKLRNVQGVRPGMLPLVAVDGRVGSITDLEKIPARKIETIQIFSWEDVFRDPALVERYGDAARVGAILVTTRDAAKQAEKEARKSGAGESVVASVPEGPSFGTVQTGNTPVDGQVKVRISEVAVPNDSLVVSGHDLSSMLFLLDGRRVAVAEVKALNEAEIESMSVLKDEWAVERYGEAAADGVVYVTTTEGARQFGRLECSFEHGNSFQEGPGFYRIKDTGNGFAIRPLNGARPLVLINGRQVDDDYLKSIDAGKVLWVRILQPGFELLDRYGERAWDGVIEFGTNESGERTTLAVYSSDASGKRNKMTVVREPSGASSGHSSVSKSIATSAQPLEEVTVATYTAGVDSVSIENGSLKQVGLIVLDGEEISADRLSQLDPSRIDAMTVLKGEQAVEHYGEKGAKGVIEITTKKNRSGVAGEMFFSYGMKRIRSPRPEIKIGASQIGRSYFYKKHPATKCGCRMLPMAEAEKTRYSDAELEEFKQLILKKLETARADYELLRATITHTASNDTEDTSPTFKVLEEGATTLSKEESGRLAAHQMKFIRNLEMALVRIENKTYGICKTTGKLIPKERLMKVPHATECIEAKEGRIHMKFKEYKGLDLPGLAADVLKEWDAQDTFHKSISTREGHPTFVFYEGPPSANGTPGIHHVMARTIKDIFCRYKTQQGYLVHRKAGWDTHGLPVELGVEKKLGITKEDIGRTISIEEYNRACREAVMEYTGLWEELTRKMGYWVNMDDPYITYDNKYIETLWWLLKQLFDKGLLYKGYTIQPYSPAAGTGLSTHELNQPGCYRDVKDTTCTAQFKIIRDERSEKLFDGAEGDLYFLAWTTTPWTLPSNTALAVGPEIEYVRVKCRNPYTDAPQTVILAKELLGSYFTPKMEGKFEISPVTYKGPDFEGIRYEQLIPWVKPAGDAFRVILGDYVTTSDGTGIVHIAPTFGADDDRVARAAGIAPLFMVDKAGKNQPMVDRKGRFFLLEELDPTFIRDNVDTAAYSQWAGRYVKNAYDDSLAADAPTLDVDLSVMLKAENKVFKIEKHTHSYPHCWRTDKPVLYYPLDSWFIRTTALRDRMIELNKTIRWKPESTGTGRFGKWLEGLVDWNLSRSRFWGTPLPIWATEDYSEMKCIGSVEELVAEIEKSVAASLMKENPYKNFKPGDLSKENYSTDRIDLHRPYVDNIVLVSSKGEPMRREPDLIDVWFDSGAMPYAQLHYPFEHGGDYFKSVYPADFIAEGVDQTRGWFFTLHAIATMLFDSVAFKNIISNGLVLDKNGNKMSKRLGNAVDPFEILSTYGADATRWYMISNSQPWDNLKFDRDGVDEVRRKFFGTLYNTYSFFALYANVDGFTGQEPEVPMSERPEIDRWIISLLNTLVRNVTESLENYDPTPAARMIQEFVCENLSNWYVRLNRKRFWGGGLTRDKLAAYQTLYTCLETVSMLSAPFAPFISDRIFRDLNAVSGRHTDESVHLSTFPVCDSSLIDGELEQMMSMAQQVSSMVLALRRKVNIKVRQPLTKILIPVLDADTARRIEAVKGLIMSEVNVKEIELIENTTGLITKRIKPNFKTLGPKYGKQMKQIAALVAGFSQDQIAAIEASAETLLDVDGEKITVTPADFEITSEDMPGWLVATEGKLTVALDITITDDLRAEGIARELINRIQNIRKDSGFEVTDKIRVEIEQQEFVLPALKSFADYIASQTLAVEIEGVPSPSGEFVVESEVDEQPVRIAVTKIMFSIVVFMGWQNPIRPDSAGQPRMRSCYLSLSYSAAPEFAVCRLFRAGSRRRILPTCKVTKKYEMTEKEKMQAGEWFSPNDEELVRDRARARHLTHRLNVALKDKDATYLATLRELCPRVEAMIRAPFHCDYGYNISIGKGSYVNFNCVFLDLGPIRLGQRCLIGPGVQLLTAVHPMNAAERATGKEKGAGIEIGDDCWLGGGVIVCPGVKIGCRCVIGAGSVVTHDIPDDSVAAGNPARVIRTATDEMFKTYMRLLGFVSPISKYAVPYFFYALLYALFNTLTYAMILPIMNTLFDDKNSYVFQPVYDFPMHGLSFSDIDASQMLSYVYTQLFGTNFTMSKMLLLLACGTIVMNLLSNFFRYMSAWTVENMRVRSLQRMRNDLFNKIMGMNAGYFSDQRKGDLMSRITQDVMVVQYCITNTLQVAFRDPLLIIGYVIYMLLVSWQLSLFAILFLPVVALIIGRIVKKLRHPALKGQERMGDMVSVLDESLSGIKVIKSYNATDYIRRKFSEFNAEFSRLMLSMARRQQLASPMSEFLGLTAVAVLIVFGGSLVMNGSLSAGGFVGFIAVFSQITRPVRSFIDQFANINQGIAAGERIFDVLDSEPEIQDKPDAKTLDGLHEKIEFRNVHFSYDGSREVIDGISFDIRRGETVALVGPSGGGKSTLSELIPRFYDTTGGDILIDGVSIRDYTQESLRAHMSIVAQDTVLFNDTIENNIAMGRRGATHEEIVAAAKIANAHDFIMECPSGYDTNIGDRGAKLSGGQRQRLSIARAVLKNPEILILDEATSALDTESEKLVQDALNSLLQGRTSIVIAHRLSTIHNADKIIVIERGRIAEQGTHSELMAKNGIYAKLIEMQSFDMENFKQIDPAEITDNFIRAIGREWMLVTAGNRESCNTMTASWGLIGFIWGRPVAQFVIRPQRYTREFVDREERATLSFFSPEYRAALEYCGSRTGRTEDKIRNAGLTVACTDDGVPAPAEARLILQCRKLYVGRIRPEGFVDRSCDTKWYPQHDYHEVYIAEIERAYVRKMPEITIYTDGSALGNPGPGGYGAVLISGRFRKEVSQGYRLTTNNRMELLAVCVALEMLKFEGSDVTIYSDSKYVVDAVEKRWVFGWEKKGFAGKKNPDLWSRFLRSYRRHKVRFVWVKGHADTVENNRCDQLAVAAANDRAHLLEDTGYVPGSGEMQIADKYSPQEIESKWYDYWMEHRLFHSEPDEREPYTIVIPPPNVTGMLHMGHMLNNTLQDVLVRHARMQGKNACWVPGTDHASIATEAKVVAKLKAEGIEKSSLSREEFLRHAWDWKEKYGGVILQQLRKLGASCDWERTCFTMDEARTESVLRVFCDLYEKGLIYRGVRMVNWDPSAQTALSDEEVVFKESHGKLYYLRYRVEGTDRTIIVATTRPETILGDTALCVNPDDERYAWLPEDARVIVPLVGRSVPVIRDTYVDIAFGTGALKVTPAHDVNDYMLGEKYGLESIDIFNDDGTINDKVGLYAGMERFALRKQIEKDLDAAGLLEKTEDYTNNVGYSERTGVAIEPKLSMQWFLSMEKLAGPATRAVLEDEIKLVPEKYKNTYRHWMENIKDWCISRQLWWGQRIPAWYLPQGGYVVALNADEALEKARAKSGDASLTLADLRQDEDVLDTWFSSWLWPISVFDGIRRPNNKDIEYYYPTNDLVTGPDIIFFWVARMIMAGYEYRGEKPFGHVYFTGIVRDKIGRKMSKQLGNSPDPLDLIAQFGADGMRVAMLLSSSAGNDVMFDEALCEQGRNFGNKIWNAYRLVNGWTIDDTLAQSENNRLAIEWFRQALAKTLRQVESDFASYRISEAFMNLYKLFWDDFSGWYLEMIKPAYQCPIDRPTLEATCGFFDDLLRLLHPFMPFVTEEIWQDLAPRKAGESIMVQRMPEAREIDEALLGRFELTKEVVTAVRNVRKQKNIPQKDPLTLRVIADENYPAEYAPVLQKMGNLSQIETTREKDPSAVGFLVKTTQYFVPMEGMIDIEAERKKLAGELEYLEGFLASVQKKLSNERFVSSAPEKVVANERTKQADAEAKIAALREQLAALKMFFVLKTFPVKERRSEGKAVGVGSFRRENLSDDTENTSIFSHIIKRIMSKKDKIKNIDMDDLKALPDVLDGRHHVIPIVTGGDEVLEEVNVPEILPILTLRSSVLFPGAITPITVGREKSIRLVREVNERNGLLGAVLQRESEVEDPAPDDMYKVGTAARIIKILEMPNGNLTVILNGLEKIEVKEYVSTEPYFQASVTPLRDSSPDVKSLEFEALVDSIRDIALGIIAISPDMPKEAAFAIKNIDSKRGIINFICSNLELSDEDRQSLLESPGLLARARKLLEILVREQQLVELKNEIQSRVKQEIDKQQRDYYLQQQMRTIQDELGEGADSELEGLREKASKKNWPKEVAELFEKEITKLERLNPAVAEYSVQVTYLQLMLELPWNDVTQDNLDLKCAREQLDHDHFGLDEVKERLLEHLAVIKLKGDLKSPILCLYGPPGVGKTSLGKSVAAALGRKFGRISLGGLHDEAEIRGHRRTYIGAMPGRIIQTIKRCGSSNPVIILDEVDKVTVSNHGDPSSALLEVLDPEQNTTFHDNYLDTEYDLSKVLFIATANNIGNINPALRDRMEMINIPGYILEEKVRIGLDHLLPKQMTAHGIPEGQLVLTPEVVEQVIAGYTRESGVRSLDKHLAKIARYRAKQIAFEEAYTPELTQADVEKILGIPKFLREEYEVGDMVGVVTGLAWTEVGGDILYIESVLTPGKGKVSLTGNLGEVMKESATIAHEWVMAHHKELGIDPEMFEKNDINIHVPEGAIPKDGPSAGITMVTSIVSTYTGRKVRERIAMTGETTLRGRVMPVGGIKEKILAAKRAGIKELILSEDNRKDISEIKAEYIDGLTFHYVRTNEDVLRLALEEKKMEFVAIIPARYASTRFPGKPLAMLGGKPVIRRVYEQVTGVLPDAVVATDDERILRAVEEFGGRAVMTSSEHRSGTDRCWEAYGKLGREYDAVINVQGDEPFIRPEQLRAIMRCFDVPGTDIATLVRPFAESDGLAALENPNSPKVVLDGESRAIYFSRSVIPYLRGVERSEWLAKHTFYKHIGMYAFRTKVLAEVTALPPSSLEKAESLEQLRWLENGYRIGVGISDVETIGIDTPEDLAAAEEFLKRMKRMDKKPLFIAGPCVIESAELLDTVAVTLADINRRLGVEIIFKASFDKANRTSISSFRGPGLEKGLRMLADVRSKWGLRLLTDIHESCQAAPVGEVVDVIQIPAFLCRQTDLLVAAARTGRTVNIKKAQFLSGEDMRYPYEKAMKAGAGEVWLTERGNMYGYNNLVVDFRNIPDMLGIASTVVMDCTHSVQRPGAAGGKTGGNREFVPAMARAARAFGANGFFFEVHPDPDHALSDGPNMLYLNDLENVIKSLLMTADKRADILSLARKTIHTEALALKHLEQTLGDDFVCAVELILHSRGKLVVTGMGKSGLIGRKIAATLASTGTPSFFLHPGEAFHGDLGMISPEDTVLALSYSGETDEILKIVPFIHTNGNKLISMTGNPESTLARNSDVHLDVAVRHEACILHLAPTTSTTAQIAMGDAMAVALMKLRNFTSIDFARLHPGGSLGRRLLMTVGNVMHKEGLPVVAPDCSAKDMIHAVSKGGLGLIVICEGDKVLGIVTDGDIRRAMERRESEFFSIRAMDIATLNPKTIGPDEKLIAAEKKMTQHKINSLLVTDDEGKLVGVIQIYDIKLMFLIIVDYKKPLEEVERYLAEHWAFLDRYFAQGKLLCTGPQNPRTGGVIVSKAANRAEAEAFTREDPFFRHEIADYTIVEFEPTKYLPGFEKFRMNFNWADDTNCAVTVCDTEGVVIYQNKQSISVNGEYRGKSMLPCHNERSKGIIARILEKGDTNAYTIEKKGIRKMIYQTAWRREDGTVGGIIELSMPIPAEMPHYVRGMFKRITPQTIADWGERIYIRFLELTKRFTSTQIMALLAIIVGVLAGLGTCLFELLLYGIKAGLTHWFPVEQSHFLFLFYPVIGIILASLFVKYVVKDNISEGVTRVLYAMSRKNSYIASHNCWTSVVGGATTIGFGGSVGPEAPIVLTGAAIGSNISRLAHLNYKNTTLLLCCGAGAALAAIFKAPITGVVFVLEILMLDLTSRTVVPLLISSITAAAIALTIRGFDPIIAISLTPDDAFRLNQIPLFVLLGIFCGLMSYYFTTVNARVGAFFKKIDSPYKKWLIGGAVLGILIYIFPPLYGEGYEGFMSLMHGNTTELFNNSLFYRFSQIDWVVILFIVGTMFFKVIAMASTNAAGGVGGTFAPSLFVGAFMGAITALVCNTLFGWNLSLVSFTLVGMSGVMSGVMKAPLTSIFLIAELSSGYGLFIPLMITACIAFAIDYYLDPDSIYTKQLRQNGELITHNKDESVFVFLRLDDLIQDDGVYIHPSQTLGDIVQIMSRERHDDYFPVLDNEKHLLGIVRLNDVREDLFNPQKYGNPITRYMLLSPDTILQHEQIQSVLRRFDENHVWVLPVVDKEKHYLGYISKSRIMTAYREQLVKISQMGKIILTGDRPTGKLHLGHYVGSLRRRVELQNSGEFEKIFIMIADAQALTDNADNPEKVRQNIIEVALDYLSCGLDPAQSTLFIQSQVPELCELAFYYMNLVTVARLQRNPTVKAEIQLRGFAEGNEEDGSQRQGIPVGFFTYPISQASDITAFKATTVPVGEDQEPMIEQTREIVHKFNSVYGETLVMPEILLPDNAACLRLPGTDGKAKMSKSLGNCIYLSDSADEVKKKVMGMYTDPDHLRVEDPGKVEGNTVFTYLDAFSRPEHFQRYLPDYASLDELKAHYRRGGLGDVKVKKFLIAVLNETLEPIRERRKQYEGRIEEVYEILRKGSEHARATAAQTLGEVRHAMRIDYFDDKELIAEQARQYQQQRMTIIQLEYLLAVANCGSFSLAAEHCFVTQPSLSMQIKSLEEELGVVLLDRSKKPVIPTEAGEVVLAEIRETLRAYDHIREAVAELKGETSGRLRLGVIPTIAPYLLHKFIPDFVRDYPKVELEIAEMVTADIVDALRRDRIDAALVAGGTCGEGIQEHELFDDRFHLYVSRENPLFERTNVRIEDIDLKELVLLSPGHCMRDQIIELCQAKREVPSHYTFESGSLDTLMRIVDYTHCVTIIPEMAVEYIPAEHRCQVKTLAKGATSRKIAVAVRRTYVKSSIIKALIDTILSKVSRQMEKLTGTIIRAIQDKKGKNIVSLDLSKIDGAICSCFIVCNADSTTQVAAIAAGIEEQVLETLGEKVWRVEGQQNALWIAMDYVDVVVHIFQTELREFYKLEELWADAPATRYEYDEMAQQKINNKMNMPRPSWMWIYGVIIIFIVGYWMFGPGNGVPVKSDWNTVAQMIEQGDVEKIQVVNRDLAEIYLKKDAADRYRKDAVDPRFRNMPETGAQLTFNIGSVDTFRQDLDKVTAESGNKVVLVYENRENSWTSILLQMLPWIIIIGGWFFLMSRMSRGAGGGAGGIMNVGKARAQVFDKENSKKVTFKDVAGLEEAKVEIMEIVDFLKKPDKYKSIGAKIPKGALLVGPPGTGKTLLAKAVAGEANVPFLSISGSDFVEMFVGVGASRVRDLFEQAKQKAPCILFIDEIDAIGRARGKNAGFSGNDERENTLNQLLTEMDGFQTNTGVIVLAATNRVDILDKALMRAGRFDRQIEVGLPDVKEREEIFDVHLRPLKLDPELDRTFLAKQTPGFSGADIANVCNEAALIAARHNKKYVSREDFLAAIDRIIGGLERKNKIISDEEKRVIAYHEAGHATVSWILENASPLIKVTIIPRGKSLGAAWYLPEERQITTREQMMDELAAMLGGRVSEQINFGEVSTGALNDLERATKMAYAMVAYYGMSEKVGTISYYDSTGQSDMALTKPYSELTAQQIDAEAKNTIAEAYAMAAEVLRSHADGLKELAELLLEREVVFTEDVERIFGKRKKDILRERKEAEQKALAERKAASGDAEEAAGKKEVASAEPRKDEEKISGTAASAVSDGKSSAETPEVMSDKIRNLLVRTLSGAVLTVVVVGAVLWSQWSFGVLLLAILIGGMWEFYRMARREDIYPLKWLGLVTGTALFVASFLLAVSAEQVALLPRALSVLLWLLPVFILLIPLMFVCELFLKRARPAADVGATLGGVFYVAVPLSMMAYLPLLTGKGGWNPWVILAYIFIIWANDVFAYLVGVSVGRHHLYERISPNKSWEGFFGGIVGAIAMGCLAAWWLDGSYWLWCCLAAIAAVSGVLGDLIESMFKRAAGVKDSGNILPGHGGWLDRFDALIFSLPFVVAYLVLLYISMKINKEGYKIIGLTGVVCFLLWALMYYLMSRHAEAGLLWFGSILLVLFWFFIVAFFREPRRVKIHDAELVFAPCDGRVVVTEMVHESEYLDREMLQISIFMSITNVHMNWVPVGGTVEYFKYHPGRFLVAWHPKSSTENERTTTVVRTPDGKEVLFRQIAGLIARRIVSYMKVGSKVEQNSVCGFIKFGSRIDILLPKDTELLVEIGDPVVGSQTPIARLKMSITPQTLLRFTVGAAITAVVLFLMWYFSSIVIYILVSAVLAIMGRPLVARISRGRIGRWRVPRWCGALVTLLVIWIVFAVMCGLFVPLVTNKLYQLAHLDFSTVLTSVEEPLQRIQDYLTHFFSLPETQVSFKDTLILFLQSLINFDTINTAFSSVVSLAVSSVIAFFSISFITFFFLRDDGLFYAMVTALFPDRYQQNVTHALNSVTVLLFRYFRGILAESFLLMLAVSLVMMAFGMRAQDAFFIGLIMGVMNVVPYAGPTIGGAVSVCMGIITPIEGMSIGHTMLVIAGSLLILKGLDDFVLQPTLYSERVKAQPLEIFLVILIAGSLAGVIGMLLAIPLYTVLRVFAKEFFSQISLVRKLTEKIMSVWIEGEVMHGRQLGRELGFPTANMEVADADTIESGVYESYVEIDGVEYKAMSNLGSNPSVGGGPRHLETHIFDFSGDLYGRRLRVELRRKIRDERKFDSLEELQRQIERDRSCILSSENRRRMFLDLSLPYKVADMSLAEWGRKEIEISEHEMPGLMAIRRKYGPQKPLKGVRIMGSLHMTIQTAVLIETLVELGADVRWCSCNIFSTQDHAAAAIAEAGVPVFAWKGETLPEYWWCTAMAMSFPGGKGPQLIVDDGGDATLLIHKGYKAENDASTLDYEPSSYEEEVILDTLKKILAEDNGKWHRTVAEWRGVSEETTTGVHRLYQMQEAGELLVPAINVNDSCTKSKFDNLYGCRESLADGIKRATDVMIAGKVVVVCGYGDVGKGCARSMRSYGARVIVTEIDPICALQAAMEGFEVKIVESALAEGNIYVTCTGNCDIITLEHMQRMRDQAIVCNIGHFDNEIQMARLEASDAVRTNIKPQVDKFTFLDGHSIFILAEGRLVNLGCATGHPSFVMSNSFTNQCLAQIELWQKKLEVGVYRLPKHLDEEVARLHLDNLGVELTQLTKKQADYIGVPVEGPYKAEHYRYMKKFLLLIAATAFALLTTACTDSSGYTYETVKNDPLKTRIYTLDNGLKVYMSVNKAEPRIETYIAVKVGGKNDPSETTGLAHYFEHLMFKGTQQFGTSNYEAEKPLLDQIEQLFEVYRKTTDDAERAAIYRQIDSISYEASKYAIPNEYDKLMSAIGALETNANTSMDRTVYIENIPSNQIENWARIQADRFKNVVIRGFHTELETIYEEKNMSLTDDNRKVYTTIGEVLYPNHPYGKQSVLGTQEHLKNPSITNVKNYHTQYYVPNNMAILLSGDFDPDQMIATIDKYFGDMQPNENIPQLAFEPEAPITKPIVKEVYGPDAANVTLAWRTDNAASDDAEYLLLASRILYNGQAGMIDLDLMQQQKVLDAFSYPDQRADYGALVLQGLPKAGQTLDEVRDLLLAEVAKLRNGEFSEELIKAVVNNLKVSTMREEETNVGRVEMYLSSFYNDIPWSDEVTKLDRIGSITKEQLVAWANEKLGTENYGIIYKRQGEDPSVQKIAKPALTPIQMNRDTQSAFLTEIQNSTVTPIEPVFVDFNRDMEIFKTDSSLEVLYKKNDINDLFSLTYLFDTGVLNDPALNNAFAYIDYLGTQAKTAAEIASELYDIACYYDLSASQNRCAITFKGLSENMGQVMDIFEDLVANAQGDEEILANYKADLLKKRADNKLNQEANFAALQRFAFFGGEAIQRTTLNNEQLEALTSDVLIGKVRDLLKKQHTILYYGPKDKAGLLADLKAHHQTPEVLEPLTRGNIAFQPTEQNKVCLANYNAPQLYFLQYSNLGKKFDVAVDPALKLYNEYNSGSMGAIVFQEMRESRSLAYMAFTEWINPSYLDDNYLFAAIIATQNDKMAQAIDAFDEIINNMPESEAAFKLAKEAVLTNLRTSRTIKDEVLWKYIANKDLGVTEDRNKAIFEKVQDMTFADLKAAQEQWIKDRKYTYCILGDLKDLDQDYLRKLGTVQIVSQKEMFGYMDIALSIAAFLFSITGIVGCIVPIIPGVALSYVGLLCASFCSYSEISSATLWIWLAVTVAVSVIDYFLPGYFARLVGGTRAGSIGATVGMIAGFFAGGLVGVILGPFFGAVIGELIHDRSDSAKAFRSGFGSFLAFIAGTGLKLVAAIWMICLVWSDTYPVVKNWIVTTFMKFQIEVLKSKIHRVSVTQADLNYVGSITIDEELMDAANMIEGEKVQVLDVDNGERLETYIIKGERGSGAICLNGPAARKVQVGDVVIIASYALLDFEEAKAFKPWVIFPDTKTNKLIRMETITNSEELRRALGSRDRSGIGFVPTMGALHAGHRSLVERARRECATVVVSVFVNPTQFNDKTDLKNYPRTPEADLRLLEEVGADYVFMPSVEEVYPEPDTRTFDFGMIDKVMEGATRPGHFNGVAQVVSRLFDLVKPAKAYFGEKDFQQIAVIREMVRQLRIPVEIIPCPIVRGEDGLALSSRNTLLDTDHRTAAPYIYKVLKAAVEKSHQTTPDQLAAWVTAQVESNPLLKVIYFQVVDAATMQQVRTWEESPAIQGCIAVQAGDIRLIDNIKLRMADKIYDVGRFRHSIDNWQLSMLLGIIFFIVGIVVFFEPGGTYLALSVLFGIVVILSGAFELYLGTKAPTGSGKGWYIAGGVVEILLGILLLCTPSMLFTILPFVLGFWLLFRGFMAVGVASEMMGVGIKGAGWTMTLGILVIISAFLVLFNPIIGVGVVVFWVGLSLLLAGVDLIAHAVTLRRLRKELMTLPLSRQKTALRDTSISSLLLKTIVKINKKMKPTNIFMTNEINGEGLARLNMRAVEYGPIKRSLLSASKTDTVLERMSEAAFRDIIIKKMTAIPHSNRISIRDFLARRGIQPKYERSGYGMYLSPLREERTPSFKVDYVRNLWYDFDAPIMPAKTVKRESPYLRVGTTIYKRVRQPLSSGRSVETLIPWNVETLRQDYGKSYLARIPKYDGFCTVPDHTNYRREIDGFLNRYEPIPFQPAEGIFPHIHDFLTHIFGEQVELGYDYLQLLYRRPLQRLPVLLLVSDERNTGKTTFLNLLKSIFGGNVTFNTNEDFRSQFNDDWTGKLLICVDEVLLNRREDSERIKNLSTARSYKAEAKGRDRREVEFFGKFVLCSNNERNPVLIEAAETRYWVRRVPPLLHDDQHLLAKMRAEIPGLLFYLQQRMFSSHEESRMWFAPRLLVTDALRRIVHYNRSKTETEMLSIIRDIMEAENLAEYRFDVSDMVNMLEIRGIRVDHPTVRRILAENWQLRPAPPTYYQRYTITYNGETQRQDSKTARVYTVLREHLGGLLNDAAMMDLKQLSELGGEVNVTVRLEDLRQWHRELTAVASPPSAMPVPQQAGELYTRKQTIALLGVDSSTLWRWAKSGYLVPVEYGGQRRYRVADVQRILNGGRHARMNSDYYFQKGLRLIVTGVVVLALIILFCGMVSQGFPLWLALVLLVPAGLGVVGFYFFSLGSSADLSERFFRRFGHSQPRGEEKTTTEGVGSDQRCERSPDAIVPESAVVSADPIPDDRILENALATVYEYTDKDLGDAIDETNLRILRRRLLYLACMTPVPNDVPQVRLRHDRVSYGDLCHYGWNVWNAFKGATNRFYDQTELAEWLKASFESLAKYNTKTLRAKLRATDGGYRIRLLDNLKEYIQKMKNNFWTFSDEQKSMFVAQTSERVGLPPQAVEKDWWVTMTLKALFESSCRDFITFKGGTSLSKGWHVIERFSEDIDIAIDKSFWGIAGDNKSQRDRIRKLSRAYIEQRLVAEMQALLEGYGASDFELRAVPAQDSDADPTLVLLPYRSIYANIEYVESQIRIEFSCRSMKEPRERIEIRPLIAEAYPDVFGELVFPIYAVVPTRTFLEKAFLLHEEFQKENPRFERMTRHLYDLERLMDTDFGKAALADPRMYAEIVKHRSIFNTIRGVDYRTHHPSRIDFIPPEKLAEVWRRDYERMQEYFIYGDSLPYDRLIARMAELRDRFRKVVMEDDFFSESMQAIEDKILNKMKKCGRGKLYSASDFAVYGSAVSVAKALERLTRKGGLVRIARGLYCYPKIDRKFGLGIQYPTINEIAEKVARQSEARVVPTGMHALNVLGLSAQVPMNYVFYTDGNSRTVNLFNGRKLRFKRVALKNLAYQNKTLMLAVFALKEIGRPQVTEEHTAQLKTIFTRIPKSSILPDLRLVPAWIRKIIMSFYEEMPSGIWVDRRRWGKKNDINIPNIPGEERDALLAKRAKLKELVDVIETSVEAADDKSTVTREWLEKLIRRTLRPKTATSVEDKKIDFFSLTNEYLSTHKLSESRVKHFNVLVRTLKRYELYRKLSNRRFVLDVHTVSPATLDDFGAFLMKEPEIFDVHPELYDEVPYARPKVRKNLPVKRGPYLNAAGETVIPGRPKERGMNYVSDMLIRLRSFYVWLNDNGHTSNDPFKQYKITEIVYGTPIYITTDERKQLAEADMGDDKQLETQRDIFVFQCMIGCRVSDLYKMTYANIIGDCIEYVPRKTRDDRVVTVSVPLIGAAKELIRKYLDENRGTLFPFISEQKYNVYIKAAFRKAGLTRMVTTIDQRTRQNVQVPICDLASSHMARRTFIGNVYKSVKDPAIVGAMSGHKDGSRAFARYRDIDMDIKRDAVSVLEMIYENIYKQLKFEYIYNILKYSILKLYAMKCILSVFSCFAKMRTRCGHESIAVFESKSYLCRAMGPYAFLLRSRSINATEKQYLCFMLQEFLQYLATVRRFSPLTVQNYRRDVTNFLEWLDVPEADFDPRRITVEDVREWIVHRTETKHLGAASMNRELSSLRSFFRYLHRTGRIDKEVMYRIHALKTSRRIPAFVPSTRMEGILDELDRESESPEFKFVRNSLIVLLFYSCGLRLAELVGIDRDDFSGDYTALKVRGKGDKERIVPILPPVREKILHYLDEIDRQGICISKEKALFLNQQGKRISRSTVYRTVQSQLRQGGVQGKKSPHVLRHTFATELLNNGADMRAIQELLGHASLQATQVYTHNSIAKLQKIYSKAHPREKNGAEQTKQQNMNVQIQSVKFDADRKLVEFVEHKMDKLDRFVERAIGADVILKLDKDHELGNKVATINLHIPGDDLVAESRGKSFEEAVDLSIEALKRQIDKYKGRLEKMDAFVEILLGLTLAGIVVLLVWRRHLKKKKDNMRKESLSNDECASAVDLTLFPEVKDNSEESLLIHCPACGLEVSRYAPTCPRCGHSIYLIRPLQQETVIKVIPTDQRKPESTRETTGCLSSFFGYVSLVVGAVLFNFIGYFIVLVILTLCGVFSFGEAVFLLLVGIVLAFLFWPLVASFALLNFLDMEQKNEQSVYEVMTKYAGEVIAEMAGEIFTTRNFIEAFVDKHEIIYVELLFAAYKNDRSRVFHRVHSQIGAYLSENQEKLDIKKTRRLMTRNPFGRENEVQEWRKKEMCWFIRLGFCQNLLSDKRTAPHFLFYPLIITRHVGAGWQQTFIIMKKMLALLAACLWLAGCSGDGPDGGSGNLNIVFDCSMPLQVVAGETCEVGYTLEGASENARVRVVAPDGYRVQVIETNYWSGKIVIYLPDAATDERIVVILSDEGNETVSRYIDLEVKAKSDVVFDLSANSYLIEAEGTSLRVMLITNIDYTVEIAEKDRTWISVETSRTDQREESLVFSFRPNSDVKSRQATVRLVDSEGNLLDSICFTQATSGSVNVRLERADVWTQVIWLSGSCASDVAQAGFRYRKQGDKEWVEVAGAGSSNGFSAHVEAEPETTYEIMACWRDEESRIHIVTTLPALKLPNGDFEEWNFSEEGAFWATSIVRGYPEMGLPQPTIRPGSSGKYAVKLQKEEWGSIVKDLYGGHIFTGINVDPAAGSGVIGVLSMLWNIYGQLFEATPTALRGWLQCRNVMSTDTKEQEATIRIALGTWSPAPDHDVKIPEHPVVDQYLEEALDPSCSDLIAYGELQVAEDVDWQQFTIPLEYLRTDRKPTHLIIACDAGSRILCLDDFELLYDYNFMRYTNKKILKITFPVLVCLLMEQLIGLTDTAYLGRVGEAELGASALAGIFYLMIFMLGFGFSIGAQILIARRNGAKEYSQIGPLFMQSTAFLLLMALVLFILSKVFAARIMGALIEAPDVREAAVRYLDYRVYGFFFAYVGSMFRAFYVGTTRTRILTINSIVMVLTNVVLNYLLIFGKFGFPEMGIAGAAIASSISEGVSALFYILYTRYRTDWRRYKFRFTGFDFSLLKQILSLSVWVMIQQGVAFLAWFLFFLCIEHLGKRDLAATNIVRAVSSLIFMFINAFASTASSLVSNLLGAGYAEQIMPLCRKMIRLCFCFVLPLCILAAAIPYWTLRIYTDDVSLIEYAIPSLWVMLTTNIPCTAAFIYQFSVSGTGNTRTALTIVACTSIVYVAYTALLVYGLHADVALCWTADHVYYGCTLTASYLYMRYGNWRARKIMKKVLSLMIVVAAAAMVSCAGKQAKQAETVEVEATEVVETPACCEEPAACEKADSCATACETPAETPAPAEAAKMYRIIVSLLFVFGLYGGVSAQSLASFKERLSQPAGSAAVTVVEHGDAAGVVSRESQSNDRIRFKGYRIGIFFDNGAEARANALAAKQTFETAFPDIPVYLVYENPYFKVSAGNCVTSEEAIVLLGKIRSQFPEAYLMREDLTVADLIRMRTLLKYVLPVLFAALLSGCGASLVRKVRIGEEVAVRQYGTVGLDLTFEVENASRRTLRLEEAELEFFTGAGSLGRAVLRGSVEIPGRSCGPVCSRWKFDFPDAAAGMVLRKRLEEGDYARLEVEVRMTLRAGAVRRRVSFERMPFSEFLNIFAEDRMRLGMKPYDTEQDKKEQVREMFDRIAPAYDRLNHTLSFQIDKLWRRHVVRIVRRMQPRRILDVATGTGDLALAMARRMRGVQVLGVDLSENMLAEARRKATACGLDERVVLSLGDAERLEVADASVDVVTVAFGVRNFGDLGAGLREIVRVLKPGGKVVILEFSTPRNPLFRRVYGLYSHRLLPAIGGMISKDRKAYEYLPASVDEFPAPECFMAMMREAGFKDCRARSQSLGIAQIYTGEKMHEKYVQNRKRVNLELFIARRIARNGPGNRPGVMVRIAVVAVALSVTVMILALAVIMGFKREITDRVTGFSAQVEVADLRSAGSIESVPVPRSEQLERAIRSAGEVVRLAPYAVKGGVVKTPDAILGVMLKGVDGGYDWSFFRDHLLEGELPRVGDSIRTKEILISRSVAREMGLVPGDKVEMLFVESEKSPRRDRFKVSGIYATGMDEFDRSVAMTDLRNVQRLADWSSDEVSGYEVTLADFSQAEDFSRRLNDMLLDSDREAFWDLTARSAQERFPTVFDWLKTHDVNAAVILVIMVVVAVFNMATALLTLVLERTRMIGLLKTMGMNSASLRRIFLYRALMLILRGVVWGNAIGLGICLLQYYFHLIPLDPEGYMLSEVPVAFGVGWWLALNAGVVAVILTLLMLPASIISQVKPVEAIRYDSMFDKPTIMKKQALITGATSGIGHATALRLAALGYDIIATGRRAERLAALKSAIEAQGGSCRTLCFDVRSEAECRKHLEPLDRVDLLLNNAGLAAGLEHIDQGSTADWDAMIDTNVKGLLYVTRIITPKMIAAGGGHVINIGSIAGTEPYENGAVYCASKHAVHAISQAMRADLLSHRIKVTEIRPGMVETEFSLVRFHGDQERADKTYTGVEPLTGADIAETIAWIVQLPAHMNVNDIVLMPAQQAGAYYTCRNTKMLLIFNLLQSGYYTTEPVASRYDAATMGMFVLIIVIGVIGYIVQARLQHVFKKYSEVPFPGGLTGAEVAEKMLRDNKIHNVKITHVSGQLTDHFNPQTMTVNLSDAVYSSRSVAAAAVACHECGHAIQHAQGYAPLALRSQLVPIVQFSSRMAMFVIIIGLVILASTQNELLCWIGVGMIGVSALFSIITLPVEYNASQRALAWLQSSHTLEGAQLGQAKEALSWAARTYLVAALSAVASLLYYVLMILGRRDMAPEKDYTHRSWIAVTLLIAVLIGLSLIPPQTLGGVSLRRANILSDLISFEEDLEKAEKAIDLDDADFHIDLTQVARQIADTVPQHAPTTYEWNLREEADDTTAQPRLPDSVRLSPTLIPIEDFDTTGHSRLTAFYEKLQKGDAPVRIAVMGDSFVEGDILSSDLREKLQLRFGGSGAGFAPMASPLTGFRRTIKTQSKGWDSYNIMQRRNTPAAISDYYYISGWLCQPSDGASVRWEGSSDRACLDSCRTARILFVSRDDSRIEVTVNDRDNRTFDIEGSPAVRQIVVHDDIRSLSFKVLSGAAGAIGYGAIFESAPGVVVDNYSIRSNNGQAMFWTSPTVNAQINEMLGYDLVILQYGLNILEPGIRSFAKYGEQIEKMIAYIRQCFPTAAVLVMSVSDRSVKSDSGFVPMDSAPYMAAAQRQAAQNSGAAFWSAYDAMQSLGGMAQFVANGWAGKDYTHINFAGGRRVAWALYDAINRGAEQHPPFTPVAHDNVIDTRKISHLEMMLRQAARPRMQKPMIQTVENIGEKLVSMLTYDASQPLIFSSGLFLFLFAGFLFFYGFTRRAPMARIVYVILFSLYFYYKSSGIYFLLLVFASVSDYWIAHAIYKVRTQRAKYWLVGLSVLVNLGMLGYFKYTNFLIEIANNLFGQGFLNFQNIFLPVGISFFVFQSMSYTIDICRGQLKPLNNWADYLFYLSFFPQLVAGPIVRAKDFIPQIRQNPLRVTREMFGMGVFLILIGLFKKAVISDYISLNFVDRIFDEPLLYSGFECLMGIYGYALQIYCDFSGYSDMAIGIALLLGFRFPKNFDAPYKSATITEFWRRWHISLSTWLRDYLYISLGGNRKGRIRTYFNLLVTMLLGGLWHGAAVRFILWGALHGIALALHKLWLSVVPGSKATGAEMRWFWRIPGIFFTFNLVCFGWLMFRAESMKTVQLMLHQIFTNFNPSVIPQVLEGYAGIFLLVGIGYLLHMLPDRCDRWAQRFVTSLPTVVQVLLAACVIWLVMQVKSSDIQPFIYFQFMHSCDESLFLALNFDGGPCLDRIMTLISGMAIWIPFYLLILWLVCRRYGWRNTLLFLAALALALVLSDMLCGIFKHSGPLKHLWADFPPRWRPMFSPALEGLDIPADSLFAWRHAGLPTPNSLVHVPAGAVAGKYGTVSSHAATIAAVVVMSAAVIRRRWFTWLGIAAALLICYSRIYLAKHFPVDLLLGTGVGILTGLFMLWLYKKSGRGFFKPLDPSGTRQAEMLKRNGWTRSRIALREWMPVIVLMCCTFVFNTSEFIPIGLLSDIAADFGITEARAGLLITVYAWVVALVSLPLMLAVARMECRRLMLGVLGLFIASHVLSGLSSSYAMLMASRIGVACAHAVFWSIVSPLAVRVAPKGAQSAALGLIITGTSIAMIVGLPLGRVIGLYVGWRTTFFFIAAVAAAVWLFLAAIFPRVPSRDTISLRKVPSLLGNPALVGVYVLTVLMVTGHYTGYSYIEPFLAQVAGLDNDWITWVLTAFGLVGIVGSLWFSRDYEKCPYAFMRFAVVGIAFFLLLLRLSAFGHFPVVALCICWGLAITIFNLVFQSEIIRLAPEATAIAMSVYSGIYNVGIGAGALVGGFVCTHASIARIGYAGGAIALLAALFCLVRLVPLLKRSRGMTSNFTAFLRPFRAACLFVLLTVCCGGCSDSGSVDETPPADQLALSPSSLVFDEQDPAKNEFTVTVTDGLTWVLQVKPSAAGCKFSASSGRGSGSFRVEQMPDDSSIEIEAVHTYNNGTQLKSNSVRITRGKAVLEPTLELAPEKLTFDPDDASANTVQVRSNTVWSAVASDEGLVFSPASGENDGAITVTAAPAGKTSVITVTAGEGEQTVTRQVEITCENQIPVPEETIYYDDFDQTPFSGWADASAAWQNPTGPGAAGVTYTSARTRINNDNFGSSGRYPGASGANYVRIWFDNGPYFIVNDIALTPDQVDLTLSLGASFTAADCLIELSGDGSYWQRIDYTGSRAYNIWEQISVDFTLAVPVQRLFIRFTPQGSQSYGVNFDDLKLTTGPGGQTVDLDGGDYRFPELPSNWTAPTSSQAVVSGDYAFFTHWTQTVNTRKNLRNYSYCYDTRRHNPIWVAYPMHACYREGGFGRTDPDPWTADPSLDVAYQSKIYRKDGPSGSDPYQYWTSNTMAYLQRSGYWGKGHLCMSSERGGANQQINMQTFYPTNIAPQPSAKAGTFGTVWGYVEALFAGTRNSENDIVADDGVQNMNIVSDTLFVVAGCYYEHDYWQEYDSSDSNQAEPDPAQKLCTMPTHQFKMALRTKSGSTGKRIQQCTADELQAVGFWIETFTDSPETSARAELRRIAVPVSFIEEKMGMTFFPEVPEEVKTRIPVPEEWGFMRWIGDYFVRADFPAKLRKGRDVSASCLRRGLQDGLIPGKNDAGYSFFGQMGVDFEFAKIVKGGRRAKLDSELLSLPATPGKDRLQAALPFIESFRYFFSLQDESAAYSAHPLGSSAVWTCPNRILSMSIELSEQEQLRRQSLAALRELGIDPYPAARYEVTATAREIAENFDPAKNNFQGIRIAGRIMSRRIMGSASFFELQDHTGRIQVYIRRDDICPEGDPTLYNTVFKKLLDIGDIVGVEGFAFRTNTGELSVHCQKLTLLSKSLRPLPVVKEKDGQTFDAFTDPEIRYRQRYVDLIVNPHVREVFIKRSKIISTMREYFNQFGYVEVETPILQPIPGGAAARPFITHHNALDIDQYLRIASELYLKKLIVGGFDGVYEFGKNFRNEGMDRTHNPEFTVMEIYVAYKDYLWMMEFTERMLEKVALALHGTTTVQIDGREISFKAPFRRLTMTDAIREKTGYDITGQSEEQLREACKRLEVEIDDTMGKGKLIDAIFGQYCEEELVQPTFITDYPREMSPLCKRHRSNPDLTERFELFVNGKELCNAYSELNDPIDQLERFQEQLRLSEKGDDEAMFIDMDFVRALEYGMPTCSGMGMGIDRLTMFMTGNSSIQDVLFFPQMRPEKKVVNDPAEKYTALGIPEEWVPVIQKMGYLTVDSLKKLSPGKFFNDLCGFNKKNKLGLKAPSMEEVKKWCEQEMTSGRNIWLAGICAASVLAAGLRLGDIVPGWVFRTLCTLALGTIWIRLGQQVWHRLRQRQRPWFLFWNYALPVLVAIPTLASLSDGVVPVDQRFLAAAATGAVLACIYRLIYLKNKNMRKKIVAGNWKMNTLPAEGVELAENIRADRNQVCSCVNFIVCPPFTHLGGVIEALRGSDIEVGAQNCAAEDKGAYTGEVSAAMLAALGCRYVILGHSERRQYYGETSATLNKKMAQAFANGLQPIYCVGENLEEREADRHFDVVKTQIEEVIYNLTPAQFAQTVIAYEPVWAIGTGKTATAEQAQEIHAYIRTILREKFGAAADETPILYGGSCKPSNAPELFAKEDVDGGLIGGAALKAADFLAIGKGFPQKMTDRIISGLFLFHPKSFAEKKSKKSCIVKKNTYFCIQRTVEMTRFSTQNWWWRSLFEVNNESIGICMKMKTKKIILPESQMPTQWYNIVSDMKNRPLPPLNPATKEPVTLEQMSAIFAEELMKQEMSTERYIDIPEEVQDLYKIYRSTPLVRAYGLEKALDTPAKIYFKNESVSPVGSHKTNTAIPQAYYNYKQGIRHLTTETGAGQWGAAMSMATQHFGIDLKVFMVKVSYNQKPYRKLMMNTWGADVYASPSEITAAGRAALAKNPNDSGSLGMAISEAVELALQNPQDTRYCLGSVLNHVLLHQTIIGEEAVKQMELFGEYPDVVIGCFGGGSNFAGISFSFLRDNLTNGKKTRVIAVEPQSCPKLTRGKFQYDFGDVAGFTPLLPMYTLGHNFHPSDIHAGGLRYHGAGSIVSQLLKDKVIEAQSVPQTETLAAGVLFARTEGIIPAPESAHAIAQAIREAKRAKEEGVSKTILFNLSGHGQIDLYAYEQYFAGKLRDYEISDDEIRSTLNELEKIIMRHNKNFNHLGRQAGHRKAMLSNMASSLILHKRIETTVAKAKAVKQFVEPLVTKSKEDTTHSRRIVFSYLKQKEAVTELFRTIAPKIADRPGGYTRILKTGFRLGDAADMCIIEFVDFNEAYTLGILPTAAEAKPKTRRSRGKKAADAAAEAAPATEGGEEKKAAKPAAKKAAAAKPAASKAAAGAKKVAAPKVAKKTNVGKKMMAILAFQKPEKVIMLESTSSFGKFEFRPLEPGFGMTVGNALRRILLSSLEGYAITTVKVAGVDHEFAAIPGVMEGMIDIILNLKQVRFIRTVDNQDAEKVSVNVAGVTELTAGYISNYLSFFKVLNPELVICHLAPGTKMQLTLTIGKGRGYVPAEENTPADCEFGTLPIDSIFTPIKNVKYSIENYRVEQKTDYEKLNLEITTDGSIHPTDALKEAAKILIQHFMLFSDEKITVNMEDTNGAEEFDEDILHMRQLLKTKLSDQDLSVRALNCLKAADVDTVGDLVKLNRNDLLKFRNFGKKSLTELDELLASLNLKFGMDVSIYKLDKDMGRYIGPKSKIARKFGEAIFGADRVLEKRNFPPGQHGLARKRKKVSEYGQQLSEKQKAKATYGLLEKQFSRTYEQAARMGGITGENLLKLLECRLDNVVYRLGIAPTRAAARQLVSHCHICVNGNVVNIPSYSLKVGDIVSVREKSKSLEVIVGSLAGGSKSRYAWLEWDGAAMAGKFLQRPEREEIPENIKEQLIVELYSKMAKKTGTVKKKVVKVGAVGMAYVHSTFNNVIITITNEVGDVISWSSAGKMGFRGSKKNTPYAAQTASADCAKVAYDMGLRKVKVYVKGPGAGRESAVRTIHGAGLEVMEIIDVTPMPHNGCRAPNRRRVMARIVGVDLPKNKRGEIGLTYIYGIGRSTARKILDEAGISYDLKVQDWSDEQVGAIRSKIADMGIKVEGECRSVVQLNIKRLMDIGCYRGIRHRLGLPVRGQSTKNNARTRKGKKKTVANKKKATKMKVKASIKKRSEDCKIVKRKGKLYVICKKNPKFKMRQGMAKQTAIERDGTIIEALSNAMFRVELDNGHVITAHISGKMRMHYIKILPGDKVKVEMTPYDLSKGRISFRYKMIYLKTEEEIELLRENNLLVSRTLAEVGRHIAPGVTTKELDTLAEDFIRSHGAVPAFLGYQGFPASLCISINEEVVHGIPSSKRVLREGDIVSVDCGTFMKGFVGDSAYTFAVGEVAEEVRQLMEVTKEALRKGTAQAKAGNRVGDISAAVQEYAESFGYGVVRELEGHGLGRKMHEAPGVPNYGARGRGPLLKQGMVICIEPMINMGTKAVVFERDGWTVTTRDRKPAAHFEYAVAVGKDGPDVLTDFSIIEQAINKMNGYGYLIVGIVVVAIIALLATNKKFVETLKNIYKIEELRKRILYTLGLLLVYRLGCFVVIPGINPNALGEGSALASQLEGNGLLGLLNVFSGGAFGNAAIFALGVMPYITASIIIQLMGIMIPYFQKMQKEGESGRRKMNQWTRMLTIIVLLIQGPAYITNLYHQVPEAFVYGNTFLFLAYATVILIAGTMFIMWLGEKITDKGIGNGISLIIMIGIVARLPHALLAEINARFQTSDGSAIMLILELVLLFLVFMATVALVQAVRKIPVQYAKRIVGNKQYGGVRQYIPLKMNAANVMPIIFAQALMFIPMLFANVAPGFAAAFSDMRGFWYNLTLGILVVAFTYFYTAIIINPQMMADDMKRNGGFIPGVKPGKATVNYIDTIMTRITLPGSIFLALVAILPALAMKFLNIQQAFAYFYGGTSLLIMVGVILDTLKQIESYLLMRHYDGLMKTGRIQGRYMELNNLKPAKGSTHHDKRIGRGAGSGHGGTATRGHKGAQSRSGYSRKLGFEGGQMPLQRRLPKFGFTNLKRVEFKPINLSTLEELAAKKNLTEVTIDTLVAAGFISSNDKVKILGNGAITKALTVKAHAFSKSAEAAITAAGGNVEKLMARLKITQVKSRIGATAQQRKNLDALGLRKIRQSVEHEDSVIIKGMLERVKHLVTIEEVKMANTNMKKVRTSDLELKDRLVSIQRVTKVTKGGRTFSFSAIVVVGNENGVVGYGLGKASEVTSAIAKGVEDAKKNLVKIPVINGTIPHKQEMRFGGSLVMVRPAAPGTGIIAGGAMRAVLESVGVKNVLAKSKGSSNPHNLVKATIAALCELRDAHSVAQLRGISMNQVFNGMALTKIERRERIKMRIRKIVSGTAEHPRMTVFRSNKQIYVQFIDDLAGVTLATASSLDKEVAAEAAGKNKIDVAALVGKLAAKRAIEKGISTVSFDRNGYLYHGRVKMLADAAREGGLKFMSRIGRLPVNLPAGVTVTVSPDNVVSVKGPLGTLSQKVDSDIKVEVGTHTDVHTQKEIPAVLVSRPTNQPRHRSLHGLYRALINNMVIGVSKGYEIKQELVGVGFKAEVKGNILEMSLGYSHDTYLMLPPEVTATAVTEKKGNPIVTLKSIDKQLVGQVAAKLRSLRKPEPYKGKGIKFVGEQLRRKAGKSAGAKMTDPIADFLTRIRNAVKANHKVVEAPGSKIKQEITKILYEQGYILAYKFDTNEQGHPTIKIALKWDAATKSNAIKNLHRVSRPGLRQYASVEKMPRVMNGLGIAILSTSKGIMTDAKARKENVGGEVLCYIYMWIIEKLFLYLHALYPRMSVKKCLLQASEIRAQGNAKRVECILEVIQTAENQRVTYFYMAKESMKAREVKRAKLAKRYQHKRDEIAAKVKSGEMDHEEAWIALSKLPRNSNPIRQHNRCKLTGRPKGYIRQFGISRIQFREMASNGLIPGVKKASWMAAYVPTLKTQYKEQIVPALMKEFGYTSIMQCPKLEKIVINQGMGQAVADKKLIDVAQQELSLIAGQKAVQTKSRKDISNFKLRKGMPIGVRVTLRASKMYEFLERLIAVALPRIRDFKGINEKFDGQGNYTLGITEQIIFPEIDIDKITKIFGMEITFVTTAATDEEAYALLREFGLPFKNAKKNNQMSVKLHIKKGDMVYVNAGDSKGQQGKVLKVDAQKQRAIVEGVNISKKATKPNAKNPQGGIIEQESAIHISNLQVLDPKSGKPTRIGRKQNAAGKLVRFAKKSGEEIKMIQQESRLTVADNSGAKEVLCIRVLGGTKRRYASIGDKIVVAVKSASPSGDVKKGAVSKAVVVRTTKEIRRANGSYIRFDDNAVVLLNNQGEMRGTRIFGPVARELRDQYMKIISLAPEVLMLITVMERNLRKERIGVVVSNKMEKTIVVAVARKVKHPIYGKFVNKTTKFVAECLDETCKEGDTVRIMETRPLSKTKRWRLVQIIERAKMKSAEIKDLSVKELQERIDVEKAQLSKLKLQHGVSPIENPSIIKKSRRDIARMLTILRQKNPKCMLQPKKTKFRRMQKGRMKGIAQRGNQLAYGSFAIKALDSAWITGRQIEAARQAITRYMKREGQLWIRIFPDKPITKKPAEVRMGKGKGNPEGFVAPVTPGRILFEAEGVPLAVAQEALRLGAQKLPITTKFIVRRDFVETSIMGQKVNPIANRLGIIRGWDSNWFGGKDFSEKLVEDAKIRKYLNVRLAKASISKIIIERTLKLVTVTIATARPGIIIGKGGQEVDKLKEELKKLTGKEVQINIFEVKRPEVDAVIVGQNIARQLEGRVSFRRAVKTAIASTMRMGAEGIKVQVSGRVGGAEMARSETMKEGRIPLHTFRADIDYCLTEALTKVGILGVKVWICQGTVYGKRDLFEIAGASASAQGAGQPSGDRRGPRGDRRGPRGDRGERRGGAPKRNNNSKMKAEKKQKAIAVLRDCPTSPRKMRLVADIIRGVEINKALGILRYSKKEASIRLEKLLKSAIANWEAKNEGERLEDTKLCVKEIFVDGGRMLKRIQPAPQGRAHRIRKRSNHVTIVVDKMVTVENKMSRSLKKGPFIDPKLEAKVVAQAEGNKKAVIKTWSRASMISPDFVGQTIAVHNGNKFIPVYVTENMVGHKLGEFAPTRNFRGHAGNKKKMAVRKFKPVTPGTRHKIIGTFDEITTNVPEKSLVSVKKSSGGRNNTGKMTVRYIGGGHKRMYRHVDFKRVKDGVAATVKTIEYDPNRTARIALVVYADGEKSYILAPNGLQVGQTVMSGAGVAPEVGNTLFLSEIPLGTVIHNIELYPGQGAAMARSAGSYAQLLAREGKFAVIKLPSGETRMVLVTCRATVGVVSNVDHSLESSGKAGRERWLGRRPRNRGVVMNPVDHPMGGGEGRASGGHPRSRKGLLAKGYKTRNPKKTTSKFIISRKKKMEIIIKPILTEKMTIQGEKLNRYGFIVDVRANKLQIRNAVEQLYNVVVTDVNTVNYMGKLKSRYTKAGLLEGRANNFKKAIVTLKDGDKIDFYSNIMELAVLNTQGKETGRKVVLSDAVFGVEANDHAIYLDVKQYLADQRQGTHKSKQRNEVAGSTRKLKRQKGTGGARCGSIKSPLFVGGGRVFGPVPRDYSFKLNKKLKQLARRSALTYKAQAGAICVVEPISMDAPKTKSIVAMAEALKVADKKVLLVLPDSNVNLQLSCRNLPYVKAILASNVNTYEVMNASALVMVEGAENILNTMLAMSGLIGKKIGMTSVYSAEGKNIPCTVIEAGPCVVTQIRTVEKDSYEAVQIAYDDKSEKHTTGSLLGHFKKAGTTPKRKMAEFKDMPEVNLGDTLTVDMFSEEDWVDVTGISKGKGFQGVVKRHGFGGVGGQTHGQHNRQRKPGSLGASSYPSRVFPGKRLPGRMGGEQVKVLNLKVLKIIPENNLILVKGSIPGAKGAYLTIEKMNQKIRIKLKSFDHNLVDKSAEKIVKTVKSTGAVVSGPVPLPTHKQIFTVNRSTFVNKKAREQFQLCTFKRILDIYSSTPKTIDALMKLELPSGVEVEIKVMARDLTYTRNIGIMAHIDAGKTTTSERILFYTGKTHKIGETHEGAAVMDWMVQEQERGITITSAATTAFWQYKGHQYQINLIDTPGHVDFTVEVERSLRVLDGAIATFCAVGGVEPQSETVWRQADKYNVPRIGYVNKMDRTGADFLAVCSQIKEHFGATALPVVLPIGVEDKFEGLIDLIYNNAIYYFDDKTVRDNFEVREIPESMKAEAAEWRAKLIEEVAATDDALMEKFFEDPDSITPDELLAAIRKATISMQLVPMLCGSSFHNKGVQKLLDYVMAFLPSPLDVPAVRGINPKTDAEEVRHASVEDPFCGLAFKIATDPFVGRLCFVRVYSGKLDAGSYVLNSRSGKRERISRLYQMHSNKQNPLEVVEAGDICAAVGFKEIRTGDTLCAEDAPIVLEQMTFPEPVIGLAVEPKTQKDLDKLGIALGKLAEEDPTFTVHTDEDSGQTVISGMGELHLDIIVDRLRREFGVEINQGAPQVNYKEALTKTVQHREVFKKQTGGRGKFADIIFEIGPADEGTMGLTFVDEVKGGNIPKEFIPAVQKGFAAAMANGALAGYTMDSMKVTLKDGSFHPVDSDQLSFEICARNGYRNAAPKAGSVIKEPIMSVEVVTPEENMGDIIGDLNKRRGQVTGMESKGNARVVKAKVPLSEMFGYVTVLRTISSGRATSSMEFSHFEEVPANIAKEVIEKASGKRKELEMRKAKPKKRILLPDPKFSDVAVTRFVNNLMLDGKKSIAYTIFYDSLELVGKKMKDADKSPLEVWKQALENITPQVEVKSKRIGGATFQVPMEVRPERKISISMKNLVLYSRKRAGKTMAEKLAAEIVDAYNQQGAAFKRKEEMHRMAEANKAFAHFRFMPTIQQLVRNGRVRLEDKSKSPALAACPQRRGVCTRVYTTTPKKPNSAMRKVARVRLTNGKEVNAYIPGEGHNLQEHSIVLVRGGRVKDLPGVRYHLVRGALDSAGVDGRRQRRSKYGAKRPKAGAAAPAKGKKMLKNRAGTAKNIALIYGGSEFLRIFAVHFGQWRLKFKPFIKGQKQMKARRNRENLFSKISEQPPVFCKDSESRKKMGACSQFSETYSIFCKDSERWGASQTCPDRILSSVNGERKRRAGFDFELVSPFSGSGIICKYSLYSSFIGLFSGPLFVVRRSSYVLGFRFGSGPAFLYGKMAEAGDGSKFFDMEYNFKEIEAKWQRRWQEEETYRVEADPTRPKFYVLDMFPYPSGAGLHVGHPLGYIASDIYSRYKRLCGFNVLHPMGYDAFGLPAEQYAIQTGQHPAVTTERNIARYREQLDKIGFSFDWHREVRTCDPSYYKWTQWAFLEMFKHYYDRSTDKAEPIEKLVARFEAQGTEGLDAACTQEMRFTADEWKSKTEEEREQILQNYRLAFRADTMVNWCPQLGTVLANDEVKDGLSERGGFPVEQKQMKQWLLRVTAYAQRMLDGLERLEWSDSLKEIQRNWIGRSEGAQVFFDIQGSDRKLEIFTTRPDTIFGVTFMVIAPEHEWVHDLTTPEQRAAVEEYIAQAKKRSERERIAETKRVSGVATGSYAINPFTGKAIPIYISDYVLAGYGTGAIMAVPAHDSRDYAFARHFGLEIIPVVEGGDIEKESYDAKSGKLINSDLLDGLDVKEAIGRILGEIERRGLGRRLVNYRLRDAIFSRQRYWGEPFPIYYKEGTAYPLPEERLPLELPPIDNFGPTEQGEPPLARVKEWTTPEGYPLEVSTMPGFAGSSAYYLRYMDPHNDRALVGRAANEYWRNVDLYVGGIEHATGHLMYSRFWNMFLYDLGYVCEPEPFKKLVNQGMIQGRSNFVYRVVGTNKFVSLGLKDQYKTQEIHVDVNIVRNDILDLDAFRAWRPEFKDAEFILEEGRYVCGWAIEKMSKSMFNVVNPDYIVDNYGADTLRMYEMFLGPLEQSKPWDTNGIDGVHKFLRRFWALFYNREGQLILTDEKATDKELKTLHKTIKKVREDIENFSFNTSVAAFMICLNELGGCPKREILEPLTVLLAPFAPHIAEELWHTLGHTTSVCDAQYPVCEEKYLVESSFEYPVSVNGKLRFKKEYALTLSPADIQADIVRTDEAQKWLEGKAPKKIIVVPGKIINIVIMSAGDFSRYDNMKMLLHHIYEFRKGVRDLVLCTLCPTCAGLLIERLRSQGIDYLLQPVTEQKVNLYFGKRSCLDAVQTFVDKPLNKLTPEEDFMLGIMLGYDISMQCERYCKRKFHLSGLIAMTGIFFGSTTGTTESVAARIAERLGVAQADVHNVAAASVEDVKKYDLLLLGSSTWGSGELQDDWPGFLDKLGKEDLSGRRVALFGCGDAGIYSDTFCDAMAEIRDGLASTGCTFVGGFDAEEYPGCGSRLCQDGEAIGWAVDDSASDAENQMRMELWIAAIGMADNSILTRLDGLKLKYEEIGQKLTDPEVIADVKQFIQFNKEYRELEPIIEASERYRTAIANLAEAKDILANDKDEEMREMARGEIAELEPKIETLEEEIKLLLIPKDPQDAKNAIVEIRGGTGGDEAAIFAGDLMRMYTKYIESKGWKYEITSFSEGTAGGYKEVVMKVTGNNVYGTLKYESGVHRVQRVPQTETQGRVHTSAASVAVLPEAEEFDVEISMNDIRKDIFCASGPGGQSVNTTYSAIRLTHIPTGIVVQCQDQKSQLKNFDKAFEELRTRVFNLEYSKYLDEIASKRKTMVSTGDRSAKIRTYNYPQGRITDHRINYTIYNLSAFMDGDIQDCIDHLIVAENAERLKESELMALPEGFDAEVYSVVAQIPAGRVTTYGQIARLIGMPGYARRVGHALAAAPAGLPCHRVVNSAGRTAPHWTEQRPMLEAEGVRFRKNGCVDLTRSGWKEVTLMKKQLILLFTLIFTGIFSAAAQDPIYVVNGQVVSDIRNIPPGDIESTEMLPADEQTIARYGTEASNGVILITLRYDTPARFPEADGSFNDYISKQTDWDDSLPAARVVLRYKITTDGRTVPTDELEATDRRLRRRVIDAVEKAPRWQPAMRDGKPVESEGVLRVQLPEGKSIPRPLEFIMRMKTNSLSAWILAIRPYSLGNSVILILIGSALAFTDGGFRPVVALLCLVFAVTMQCTANLVNDLCDFLKGADRPDRLGPDRAFAKGYITLRAMKSGIAAFTLAACAAGAGLLALSGWNWWLLLVGASCIVFAYFYTAGPWPLAYHGMGDIAVILFFGLIPVGFTYYLQCGGWSGETAVVGLACGMVIDTMLMINNFRDREEDRRCNKRTIVVCLGAAAGRWGYLVLGTGAILLCLSLLAEGRIAAALLPLPYLAVHIATWRKMVRIDHGEELNVCLGETARNILLFGALLTAGILLDKILCMLSFLRGRRISVRQVDRLGTVGFRGWRRRSAVRRSLCSTLGWDRQNFGNRAMQNHLTLSQLQKLVKATLDEAFALPVWVSAEIAEIKINYSGHCYLELVEKGGDNGVPLSQARAVIWRTAYARIAGYFEAETGQRLAAGIRILARVMISYHELYGFSLNILDIDPTFTLGDMERQRQITIERLQREGVWDINRENPLPQVVQRIAIVSSRQAAGYQDFCKELGKSPYAFSLTLFDAFMQGAGAEDSIVAALDAVADRMDDFDAVVLIRGGGSASDLNCFNAYRLCAHIAQFPLPILTGIGHDKDTSVADMVAHTALKTPTAVAGWLVERMTGVEGWLDTAALQLRDASAGIFRRHELRLAELGSEIAHQSALLLLRRNEQLSRWSDELSAAVGELLRRQHTRLTTAEELIASRSPEHILSLGFAIVHRGDETVTSAKGLSSGDTLRVELSDGTFDATVKMAKKEITYTEAMNEIEQILDRFRREEMTVDSLTKEVKRATELIALCKERLHRTEEELKKISEMKRLIRWALNHLPRTFLQRIAGISVPVLGWFYIGRGVECPVCGTRRRKFLPYGYVHSRPNALCPRCLSLERHRLLWLYLQRETDLPTAYPRILHIAPEVCLMRKLRKHYDGHPGLYLTADLESPLADLHFDVQHIPLEDDFTDVVICNHILEHVEDDRQALRELHRILKPGGWGIVLSPMDSSREETFEDDTITDPAERTRVFGQYDHRRIYGRDYADRLRSAGFEVADIDFAASLTEAERRLYALPDDHIYVVYKVREMYITSGRGLQFAGDGVEPYRAGDLALLGSGLPHFHLCDRVRLGGDGEASSGEVLQFPPDLFPQNMERLGDYAEIRRLLECSRRGIRFGDRVLAAEVGRLIRSVDALSGTERLVRLYEILGRLARSADYRLISPAECVCRASWCPGSPMYAVEGYLAAHFRERVSLSALAAAAGRNPAALCRYFRERTGKTPFEYLAEMRIGLAVRLLKHSDLTCSQIAYESGFNSYALFVRQFRRITGRTPDRYRREISLEVGYSRTLMGMTRQRELPVTDMAESRAGIVENTPFENFHQKRKFICKYSISIRKYNTFHNGSFPLFLSETNELMERENLLSRYGTAAERVERAAESLRQGRGILLVDDENRENEGDLIFAATNMTVEQMALMIRRCSGIVCLCLTEERVRQLDLPPMSTVNTSRYGTAFTVSIEAAEGITTGVSAADRIRTIRTAVAPDARPESLARPGHVFPLAARSGGVLERGGHTEGSVDLTKLAGLPPCAVLCELTNEDGTMARLPEVVAFACEHDFPIVSIDDIRRYRTEREAARTDLMDEKIPDREAGDFSSVHAPVPAETTDFAGSCRPVFRRSGCPCRFAAGAVDSFATVPVRAGVSEPDPIGSFGPVKFGIDRRFWASYYLMQIADFFLSLHSPYAHDARGECFIINHLTSDCIAFNFHMEEAKKVANENFDWNAFENDLGVYDQPKEQIGEAYDKTLSNIAANEVTEGTVIGINKREVVVNIGYKSEGIIPISEFRYNPDLKVGDKIEVYVESAEDKNGQLALSHKKARQLKSWDRVNEALEKDEIIKGYIKCRTKGGMIVDVFGIEAFLPGSQIDVKPIRDYDVYVDKTMEFKVVKINQEFRNVVVSHKALIEAELEAQKQVIMSKLEKGQILEGTVKNITSYGVFVDLGGVDGLIHITDLSWGRVNHPEEIVSLDEKIRVVILDFDDAKKRIALGLKQLAPHPWEALDPNLKVGDHVKGKVVVMADYGAFVEIAPGVEGLIHVSEMSWSQHLRSAQDFMKVGDEVEAVILTLDRNERKMSLGIKQLTPDPWADIETRYPVGTKCKAKVRNFTNFGVFVEIEEGIDGLIHISDLSWTKKIKHPGEFTSVGAEIEVVVLEVDKENRRLSLGHKQLEENPWNEFEGQFAVDSVHEGTITEMTDKGAVVSLGENVEGFAPMRQLVKEDGTTATVGEKLPFKVIEFSKATKRITLSHTRLFEEAKRAERAEQAAEKKASAEATKSSMKKINASVEKTTLGDIAGLAELKDAMEAAAKEEKMVQATPLNLLVKSHLALLLCNIIWACDYPFYNLVLSKYVAPIALVTASLCAAALFSLVPLLWSKAKPIARKDIKTMIGAALLIGVIRKVLLMYGLSRTSPIDGSIIDTITPLLVLLISVVLGIDKFTRLKIAGLVLGMAGAVGVVLLGASGGHTHSGLVGNLMIAGCALATSCYMVWFKKLIARYDVVTMLRWVYCLAALMVLPFGARELVHTDFAAMDTDILLATLFVVFVPTYVPNLLLNYSLKYVQPTVSSIYTYLQPVLAVILSVAMGLDRLHLDTALCALVIFFGVGLVIRSYRGPAVPSAPLPVHTHMKKIFLGISLLLCAALCACAPREKVVIILSTNDIHAQIQNFPQLATAVAECRDTASVILVDAGDRWTGNAYVDQAEGRRPVLELMNELGYDVATLGNHEFDVGQQTLAEAIGYCRFPVICANMVSENSPIPQLKPYVILDREGEKFAFVAAVTNYGYNNHPDGHDAIFEGLRFTDAVRTLEEYEYLRDSCQVLVALTHIGSKYDRELADEASEYDLIIGGHSHERINEVEDGVLITQTGRNLNMVGVTEVRLRGKEIRSLSFRLVPLADYAPDPVYQEMVETYRNNPVLKEKAGELTATADKVGVANIFLQALKRKSGSDVAFYHYGGIRRDSLSKGDLTRSDIYDLDPFISSVSVMEMTPEQMSKMVLTKYNDTVNKGESHRIDLFSTAPYVIRTDGYDAVEVIFPGLVSGRKYKVAMGDYVFKNYQGLEYTNGETTQWLVPDVLMEYVANGGKPLAPDNTLRQSVAGLHDDRENHDDRDDDMSDTLPVICENAGRTIEVAMGTTLLEVERQLRLDGPHPFLAAYVNNRIKELNYRIYKPVTVRFIDITSFEGIRVYQRTISFILQKAVRELFPDRTLYIRHSLGASGFYCEISGFGPIPAEHLDAIKARMRGIIDRNLPIQGVKMLTDTARKIYEGFGMADKIALLDSRPRLYSKIYTIDSLPGYFYGALTPSTGYTPQFDLHPYYNGFFIALPLRTDPTRLQQSVHQEKMFDVFHQYQSWVEIMGVPTVGQLNSKVLAGDASELIKIAEAFHENKLAQVAGCVAEANRERGVRLVLISGPSSSGKTTFAKRLGVQLRVLGLNPVLISLDDYFVDREKTPRDEKGEYDYEALEAIDLEQFNDHLKRLERGESVDIPRYDFISGTRQWHDNPLQLDERSVLIVEGIHGLNPALTPGVPESRKFKIYVSCFTSVALDNVSRIATSDNRLLRRLTRDYRTRGNDALSTLARWESVRRGEEKHIFPYQENADVMFNSSLFYEISVLRRFAEPILREVPDTVPEYGEAKRMLKFLDNFIPISPEEIPPTSLLREFIGGSSFKYMFDKFSDRHIGVTNPEDLKAMLAVIGVKSVDELIAQVIPQSIRLKQPLALPQGMSEYEFANHIQALAAKNRTLRSFIGMGYYPCAVPAAITRNVFENPAWYTSYTPYQAEISQGRLEALLNFQTAVISLTGMEIGNCSLLDEGTAAAEAMLMMFSLRSREAVKEGRNQLFVDRNIFPQTLDVLITRSEPFGIELVIDDYNTYEFTGKEFGAIVQYPAANGEVRDYAAFTEAAHAKGALVTAVADLLSLALLKAPGEWGADIVVGTTQRLGIPMGFGGPSAGYMTTREAYKRNMPGRIIGVSIDRLGNRALRMALQTREQHIKRERATSNICTATALMASMVGFYCVYNGAEGLRRSAKTAHTAAVTVAKALEAMDYKLAAKNFFDTLEVEAEAAVVQSLALERGINFFYPSEDRVRFSFDDVTTPEEVNEVIAIFAEAKGKKAKAVKLSEEITIPAAILRQSEFLTERVFNTYRCESDLMRYIKRLELRDISLANSMISLGSCTMKLNAAALMQPLSLAGFQNMHPFAPADQTEGYRELIDGLAADLATITGFAACSLMPNSGAAGEYTGLMVIRAYHQSRGQGYRNIVLIPSSAHGTNPASAAMAGMKIVTVDCDANGNIDVEDLKAKAQEHSSELACMMITYPSTHGVFESRIREIVDAVHDAGGQVYMDGANMNAQVGLTNPGYIGADVCHLNLHKTFAMPHGGGGPGVGPICVAEHLRKFLPSHSIVPTGGDEGITAVASAPWGSAMLFPITYGYIKMLGGEGLKAATEMAIVNANYMSSALKSEYRTYYSGETGRVGHEMILDLTHFKKDYNIDCGDIAHRLMDYGFHAPTLSFPVHETLMVEPTESEPKAEMDRFIATLIQIKRECEEAAASGEADNVVVNAPHTAAEICGEWSHPYTREKAAFPLEFIRESKFFPYVSKIDNGYGDRNLVCRCTEMKKLFFAWIMALWCFPAVFAQSGQGIRYQGEVGVGTAFGVGSNAYDRFVLETVHGVRIGPRLFVGLGVAWNYYSARGDMPDDSFREYTDGGRSFVPIFADMKVYFLDRRISPYLKVDIGYGIHKHGGIYAAPAVGVKFGLGSVLALNIDFGFQVQQQTAPDTSSGLGGIVLRAGLSFMKVEKNKMVAVDYKLTVDGAIADQSQPGAPLEFICGTGMLLPKFEEAILGKEPGEKVAFTLSPKDGYGEVIAEAIVDLPKNTFMVDGKLAEDILFAGSQVPMSDAQGNRMIGTIKEVGEETVKMDFNHPMAGKTLNFEVEVVSVRDVTPEDLQSAGGCSCGCDGGCGDHEGGCSDHKGGCGEGCCHMLHSIRQFIEALQDPYGLTRTLGEIEVCRSSDGDPLRWVGNSAVVFKIRCGSRYKMLKCYTRPMEHLEAIYQEKLLRQELYVWQADGQGEWCDVVVDDWIEGITLYESVMRSADSGDKAHLSNLARQFDRLALELLESDWAHGDLKPENILLDESGTLRPVDFDAMFLPVFAGEKSPELGTAAYQHPGRTAEDFDASIDDYSIATISTTLHALALEPGLLARYNRGEGLLLSPREIVRHGCAAHAECLALFEKAGDAVRYRIARVLKSPLMRLPNLKPLVRYAVCGPETPADRGELFVRDGLWGFKIGERELIPPIYDAGFDFSEGLAAVRTGRCWHFIDSTGAVAIDCSDCNAVKPFANGRAIVVRDGQRLAIGRKEPRTTLHIMDGEPNIPFSFFFCVAEFTSALCFDRRLSELVRTCPNLSESPSIFCKDSQSDGQSKIYFSDCRETTLSEQVFFGMSSLRFEILKTKIVKGEGNRAGLHAKIAELPPIFCKDSESREKTGTYSRFFEAHPIMTEYRKPTPAEIEALTAAGNSAENWDAIEVAQDFTPAQLSGCRLEGRVQIGRGARLRRCTIRNYRIGEEALIEGVTALECRRESSFGNGVRVAAINENGGRTVRIYDQLTAQTAYILAVYRYRPEAVEAIERMIERYATERRDTLGTVGPHARITGARFIREVNIGEGATIDGASLLENGTVCAGAYVGIDVQARDFIAAEGARIDGGTLLERCFAGECCTLDKHFTAVDSLFFANSHCENGEAVSIFAGPYTVSHHKSSLLIAGMFSFFNAGSGANQSNHLFKSGAVHQSVHLRGCKFGSSTYIMAPAIEGPFTLVLGRHTQHHDTSAFPFSYLVEQDGRSALMPGANLTSYGTVRDIGKWPERDRRTVKRDRINFEEDNPYLAGGMIDAVNTLNSLAEAHPDAESYVHNHALIRSTQLQRGLKLYNKAIVASLGAMLRNGEPGRADGTGRWNDVAGQYVPRREVKRILDAIANGGIDSLEGIDRAFDRIAADYDHYARSWAEGVLAQLLGHAPSPEEIAEAVTAGERTRETLRKSAEDDRARDCSPAMAVGYGVDADSEEEKMQDYHTVRGIRMYTQSITRSHRTAFILAIDQSGSMAEKLLFRGRQTTKAEAVAEVTNRLLFELIERARRSDEVRDYYDIAVLGYSGDGIVSLLNDPEPLVPVSRLAALPVDFAETVVERRMPDGEATFRKISMPAWIAPKAVGQTPMYEALLQIRDLTQAWCTNPAHSESFPPIVFNITDGEASDCDQREQLAICEKIRTIGTTDGKVLLINIHIATTSDSRSLLFPTEEEIPADNRYARLLHDCSSPMPEELSEAIRQVRGDLAKPPFRGMSYNTSIAELIAILNIGSISIKIQMTVPTLYNFTEALQAPDLAFSTLRDCRPRRTATGGVVLSRTSRFAEAEIEWQSRKYLLCFPLSTASIFAVEQTAARLRYLRTPLLTEYTILRDEMTYTDDTGTTRTCDVVLHRLPEGRPLSVCAAEFDAESLRSALDKLEAGLSELGFSHNNLKPGNLYVTSDGRLIPVRYHFARFGEGHDAEGFERLRQFVREQGGKGQMLCDAEPSRYTTLPEFPGHLFVGEMSDQLVRVEDETGYGFVDTENRPVIAPQFVWAADFREGRAEVQTAQGMGLIDKRGHYVIEPRYEIVDYNPYTGCSRIRSEGLWALADYNGRIVGGFTPRYIEENEYVEAMENVKCLIIGSGPSGYTAAIYTSRANLSPVLYEGIEPGGQLTTTTEIENFPGFTEGIDGPKLMDNMRRQALRFGADIRPGVITSVDLSSRPFHVIVNGEKEIQAEALIISTGAAAKYLGLPSEEKFKGMGVSACATCDGFFYRKKDVAVVGGGDTACEEATYLASICRQVYLIVRKPYLRASKAMQERVMNTPNIKVLFEHNTAEVLGDETGVTGALLRDNKGTETKIDIAGFFVAIGHHPNTEIFADQLELDAEGYIKTVAGSSRTSVEGVFAAGDVQDPHYRQAITAAGSGCMAALDCERFLLQMDTFRSSSSFPKRVTAASKPMLQELEGVRGFPCSPPAGFVRPGFERSETVRLPETKKGNGFDGSFPFFVWELLMGILLSIPQSERAKKGRKSPHILPPFFDFRGADFDMTTDDTEGTYFKYLPFGEDEEGRKMPYKIEKRMSFSVTILGSASAKPTPDRHPSAQIVKVHEQHYLVDAGEGAQQQMFRYGINPLKLRAVFISHLHGDHVFGLFPLISTLGLYGRRTPLKIFGPAPLGEMLGCHLRYFDTQLPYEIEWVEVDTTRHALLFENRTLEVWSVPLRHRIPTSGYLFREKQPPLNVRKEKITEYGLSIARITAAKRGEDILLDNGDTLPNAELTYRPYAPRSYAYLSDTSWSPKAAKLVEGADLLYHEATYAHAEHKIARERGHSTAVEAARIALKAGAGRLVIGHYSSRYKEESVLVEEARTVFPDTHPATEGTTFTIEKRQQPMTKAEIQLVRSLADKRSRTEHGLFVAEGHKFIGELCTSALRVRKIFALEGLFEGGEVETVSSREMERLSLLKTPSDSLALVEIPHHPFRPDTAQRELVLALDQVQNPGNLGTIIRLADWFGIPEIVCSPTTADCYNPKVVQATMGAILRVKVHYTALEPYLAQARERNIPVYGTFLEGENIYSTPLTPGGIVLMGNEGQGIAPAAARHVSHKLFIPPYPADRNGSESLNVAIATAVVCAEFRRQASAKRMKKLLLSVVAAFCITASPAQSFEELLAPVHSCCERGNRAMEAKRYAEAEREYREAIRLFETLPDSVRTQLDEWNYGGYLRGEYYNLACAQSRLNKRRAAVASLAAYVDCGNCDYSWMIEDPDLDNIRSERGYAETVEKAREQGDFMWILRQAGPYDSSAPTDSLPRFRYADPNDRDLVRVREYFNLDSIAGSGDELSKIRNLMHWVHNAVRHDGSSRNPTSRNAIDLIEVCRKENRGINCRMMAQVLNECYLAMGFKSRFVTCMPRKMVNDCHVINVVYSATLDKWVWVDPTFDAYVVDENGVMLSIQEVRERMRDGRPYFLNEDANWNNESPQTQKHYLDTYMAKNLYYLVCSDRSEFDTETWCEGKHPIYYVALIPEGYDCDREYHFMTTNDKWFWASPYAEMPGENALFQSTNIGYFFGVRGFCAEIMTGCKFFCRKLWGGEFFLSFGKFMSENRLKIGITQGDPNGIGWEVILKTFADPRMTELCTPVIYGSLKAAEFYQKTIADLEPVPFHIASSIHEIRRGKINLILCGDETKIEPGTASPEAGRAAAEALHAAVRDLRDEQLDALVTAPIDKESIQSDDFRYTGHTEFLAAELGGEPLMMMCSDLLRMGLVTIHIPVTEISHDLTRQKIVTRLEQLRSSLKADFGIVEPRIAVLALNPHAGDGGLLGSEEEHIIRPAVNEAYEKGILAFGPFAADGFFASGHYRDYDAVLAMYHDQGLTPFKTLSPDGVNFTACLGSVRTSPDHGVAFDIAGQDKADPQSMRNAIYLATDIVNNRRAWAEWTSNPLPHAERERGGRDLSVKDLPDTEKESMSYGNGADPDKKPLPGTFLVTSISDNPALSACADKPAGKPQAKQMIKITFPDGNVKEFAKGTTAYQIAESISPRLAADSLAASVNGATVDLNRAIEEDASIKFYKWDDPEGKHAFWHTSSHLLAEALEALYPGIKFGIGPAIENGFYYDVDSPVPITEADLETIEKKMIELSRNKEQLIRTEVSKADALKNFTEKGDPYKVELIRDLEDGTISFYTNGAFTDLCRGPHLPNTGLIKAIKLTSVAGAYWRGNEKNKMLTRIYGISFPKKSMLDEYLAMMEEAKKRDHRKLGKELELFCFSQRVGQGLPLWLPKGAALRDRLEQFLRGVQKEYGYQQVITPHIGNKELYVTSGHYAKYGKDSFQPIHTPIEGEEYLLKPMNCPHHCEIYRSKPRSYKELPVRLAEFGTVYRYEQSGELHGLTRVRGFTQDDAHMFVRPDQLLEEFEKVIDIVLYIFKTLKFDNYTAQISLRDPNNKEKYIGSDENWEKAESAIIQAAKEKGLNTVIEYGEAAFYGPKLDFMVRDAIGRKWQLGTIQVDYNLPERFDLTYKGADDKMHRPIMIHRAPFGSMERFVAVLLEHTGGKFPLWLSPDQVVVLPISEKFNDYAEKVSAYLNKYDIRSQVDDRNEKIGRKIRDNELKRIPYLLIVGEKEEAEGLVSVRAQGEGDKGQMTLEAFRDYMTDLVSHEIDANKMEQKNMRVVGDNVEQPVVLPIRDALKLADEMELDLIEISPKADPPVCRIADYQKFLYQQKKKAKELKANQAKVTIKEIRFGPQTDDHDYNFKLKHAENFLKEGSKVKAYVFFRGRSIVFKEQGEILLLRFATDLEELAKVESMPKLDGKKMNMILAPKSKKMKGESNRAGLHAEIVKSHPIFYKDSESRKENGSLLPVFRGVSYLLQRMTTTDNIFALEPGNTPAFERTALETFRFQADRCAVYREYLDRIGVIPAEVTRIEQIPFLPIELFKRREVYAGDRPPEIVFTSSNTGGTIPSRHFMQSLAHYEKAFLTAFRTFYGDPAGWSLYGLLPNYLQREGSSLVYMADRLIAACGSGGFYLDDYEKLLADMARDPKPKILLGVSYALWDLAERYAPKFENTVVMETGGMKGHREELPKAQFHRILCEAFGVESIHSEYGMAELTSQAYSSGSGIFRTPGWMRVLVRDVNDPFDIRPAGVRGGIDIIDLANRYSCAFIQTQDIGRVFDDGSFEIEGRIDRSDIRGCNLLVQMNEIDFVILWVDGNDPAWREEFVRTRQAENDDASEIRYRDWRNLHYWFRSAERFAPWVRKVHFITWGHLPAWLRRDHPKLHIVNHRDFIPAEYLPTFNSNTIELNIHRIEGLADRFVLFNDDTFLTRGCRPEDFFRRGVPCDMARLSVVQPSSVGHIIYNDLELINRLHDKRTAIRTHIARWFSPRYGIVSLLKTLTLLPWGFFPGFNDSHMPQPYLTERFRQAWERWPQELDASCRHRIRSLSDLSHWLVRYDMLASGAFAPRSMADCRLMTLTDDSLESICRDIEQQRWRMICLNDSEHISDFDRQCQRLCKAFERILPEKSSYEIMKSDISVVIPLYNKEKEIACTLRSVLAQTSQPLEIIVVDDGSTDGSAARVEEIGSPLIRLIQQENRGVSAARNRAMQEACGEYAALLDGDDTWEPGYLAEIERLIAAYPGCGAYATSFNVDDGHHLTPGDTPQTEGVVDFFTEALSHYVLIPSSTTLRRKPALSLGGFPEGMRLGEDQYLWTKLARTSPVCFSPARLVRYSKAASNRSAAIYRPEQTRFSFEDLYEPAARDSSNEYVARAALGKALVVSAKGGTAEAARAAKFFAYTRHDRRTLRKLRILNALPVRWRGPLLAAYNRLAWAIARKGMMARVFTKIGKEIEIAVKSAGPDPSANTRLRILIQNAKAENMPKENIERAIKRATEKDSADYKEVIYEGYGPHGIAVMVETATDNTNRTVANVRMHFSRCGGTLGNSGSVAFLFEHKCVFKFHVPAGTDFEELELSMIDLGVDEFAPEDETTVTVEAPYESFGAIQKWLDDQNYEIVSGESIRIATDTKELHGEEREAVEKLIERLEEDDDVVNVYTAMKDEAEEEMPPTLQLARLAIFKRSSHSFLYFFNYSTTLTPTPETSSGTGARRKIKKNNSYFTRNIQKCLTLPKVFAARGPAGSPDATACLNVRFRDRKSGSRRRLRERSETDFPPASPQTEDANRPYDHDPEPMEIKARFDHFNINVTDLERSLAFYDRALGLKEISRKQADDGSFILAYLGDGETGFRLELTWLRDHAATPYELGENESHLCVRVAGDYEAVRAYHKELGCVCFENHEMGLYFINDPDDYWIEVLPLNHMATETMEQAVTEAVRILREGGVILYPTDTVWGIGCDATNAEAVERIYRLKRSENKKSMLVLCATPDMVVRYVHKAPGIAFEVQELATKPLTLILPGASGVAANLIPEEGTLGVRIPDHAFCQAMLRKLGRPIVSTSANISGEDTPRNLAEISREIIDGVDYVVNPKFEGKPTGKASSILLFNEAGEFRIIREMARIIKTLIQKRVSDIDMFQHVNNVSQQMYFDLGKADFYRQVLQDDVLSGTSRIITAATANSFKEQIRMEDDIYVTTTVAKVGNKSITLFQQIIGRNAAGRETVKTESTSVMVAFDFDRQESVTVPERWRRNLADMERGALKGHGALLLANVIWGLNSPICKTVLLSPENPEGLNHFALTVYRLVGAFLLFWLASAFLPRERVAWRDLGGLFVASLFGIQLDQILFLWGLSLTSPINVSIIATTVPILTMILAMFFLREPITPLKTGGVLLGAAGAVLLILISSRGESGGGSIAGDIITLVSSVCYAIYLTACRKVILKYSPVTTMKWMFFFAAIVVVVLYHRPALEVDFPAVPARVWGGAAFAIVLSTFLAYLMVPIAQHYLRPTVISMYNYVQPVASVLFTVVLGLDVFGFTKAAAAGCIFLGVWLVTMSKSRKDLEAEQAAKMTDKKMKKNDSTAPLSLPVFRQISAIAARQDVPAFVVGGYVRDFYLGRPSTDIDVVVVGSGIGLAEELGRELRTKVSVYKTFGTAALRTRGVEVEFVGARKESYVRDSRKPQVEAGTLEDDQRRRDFTINAMAWSLAEEDFGRLVDPFDGMRDLHEGIIRTPCDPDVTFSDDPLRMMRAVRFASQLNFRLFPETFEAIVRNRERIGIVSRERIAVELNKIVLSPVPSVGFDLLERTGLLELIFPEMQRLKGIERRGQHAHKDNFYHTLKVLDNVAAVSDDLWLRWAAILHDIGKPLTKAYDPQVGWTFHSHEVVGSKMVPGIFRQLKLPLNEHMKFVRKMVFLHLRPIILSEDMVTDSAVRRLLFEAGDDVEKLMTLCEADITSGIDAKVKRYLQNFELVRRKMKDLEERDRIRNFQPPITGEIIMETYGVPPSRVIGEIKEIIKEAILEGEIPNDYEAAYALMERLAEERGLRKKQMTKLSVNINKIAVVRNSRGGNLPDVVRAALDCERFGAQGITVHPRPDARHIRYSDVRDLKKVLTTEFNIEGNPIPSFRELVLEVRPAQVTLVPDAENAITSNAGWNTVKYRDFLREVTAEFQARGIRVSIFVDPVAEMVAGAKECGADRVELYTEAYARDFAAGRERAIEPYVRAAEEARRCGLGLNAGHDLNLENLCYFVERIPWTDEVSIGHALICDALYYGLENTVRLYRRELAFMKIILFSRQGVVHTAGDLHQMFDAIARFGFDYAVNEEFAPQIERLTGISIDAAHRYGRPMGPQPAESVLVCYGGDGTLLDGIHRLGGAEIPVIGINSGHLGFLTSVPRNGCIGDVFELIAAGKLECQPRSMLEVTGDFGDGISTRYAVNEVVIQRQGAGMISVETYVNDQMVATYHGDGLIVSTPTGSTAYSLSVGGPVVAPQCACLVLSPVAPHNLTMRPVVIPSSSDVRLKVHARHAEISIATDNETCPIPEGAEFRVRLASRRFFLAVPHNISFYDTLRKKMMWGVDIRSMSEQKRIPRHVAIIMDGNGRWAAQHGLERFEGHIRGVESVRRAIQAATRHGVRYLTLYAFSTENWGRPAAEVDALMELFCKSVINETPELAAQGVRVRIIGDKSRFPEKVKHHLDQIENRTATGKRLTLQLALNYSSRSEIVHAMQGLARRAAAGIFSSEEISEQTVSEALYTAGCPDPDLLIRTSGEQRLSNFLLWQAAYAELFFTPVLWPDFTEEDFAQALDEYARRERRFGLVKNNERIRMNHPGKVFLTLTAALLLLCPQIFAQEPSGEAAPPPAEQTDQDEDTNQLLQQFEKAPTLEGGTQKLYHIRNVNIHGAQYIDNSILRASSGLIPGDSIYLPSNFISTAITRLWNQRLFSDIRVGATIEGDSLDLEVFLKERPRVNYWRFEGISKSNQKDLLEKLKLKRGTELSDYVIDKNSKLIHKYYADKGFRNAEVSVRIDNDSILKQAVNVTFIVDRKRKIKIGEINFTGNEEFSDKRLRRTFKKTHQKSLNFFRGAKFNEEDFENDKELLLDFYNSKGFRNANIVADSIYAINDKRMGITLDISEGNKYYIRNVSWIGNSVYETDELARMFGVEKGSIYDKKSMYKRLGIGAYYNPDEPSITNLYKDQGYLTSQIDPAEIIIGKDSIDLEVRVFEGKQFTINNVGISGNMRLDDEVIRRELYTRPGELYNQSLLFQTIRTLGSMGHFTAEAIAPDIQPVVNSDELVDINWPLEEIASDQFQIAGGWGGGTFVGSVGVTLNNLSIKNFFKKGAWRPYPMGQNQRLSISAQTNGTYYKAFAISFTDPWMGGRKPNSFTISAHYSDENNAYYAWQKGTRYFRTAGVAAGLGKRLDWPDPYFTFYAEASYERYMLKDWNTFVLKNGAANLLSIRLVLGRNSVDQPIYPRRGSDFSVSVQLTPPYSLWDGKDYKSTALSEQERYNWIEFHKWMLKGQWFTPLTRNGNLVLMARAEMGYLGHYNKNKVSPFERFEVGGDGMTGYNMYGIDIISMRGYDDGALDPVGSNYSCAYNKYTMELRYPLLLKGQTNIYVLGFLEGGNGFTSWKEFSPFKIKRSAGIGVRLFLPVVGMVGVDWGWGFDPAAGQTKRSGSHIHFTMGMQFMKRILLLVLAFTAAIGSLSAQNYIVVNSEKVFKSIDEYNKALDTLDQLAKSYQQQVDLKFEEVEALYNNYKAQEMSLSASSRQARQNLILTREEEASKFQEEIFGQDGTLMKKRIELIQPIQKRVFDAIANYAAQNGYELVLDAASNPTLLYNSEKIDHTQALIEFMKKMKKLIKLTLVVALVLGSSSLFAQKLGRINLEEIITLMPEYKEMMTNMEAYSKDLRDNLETIQVELNTKYNDFQKNKATYSEVTRQLKEKELTDLQNRLQEFYQSAQEDLQKKEKELTDPIVAKAQEAVKKVAQKGAYVAVFNTTIPSMVYYDEAAMTDLSTEVKAELGIQMKRLPVIFVFLLAVLAGVSCSVTRKLPEESYLVQKVTVEADKETPKKERIPASDLRKFIRQNPNKRFLGLNFYVWVYEQADPEKDNWWNRFKRRIGEAPVLLDMSLTEQSVRNLKVYMDYRGFFSSQATYEVDTTSRKKRAFITYRTVQREPYRINRLSYDFRDRFLEQIILPDTVHSLLRTGEVFDMEVLDQERQRITTYLKQRGYYNFTVNNIEYEADTLGGNHLVDLKMIVKQHLAGYNEQGYPILRNNTVYRIDQINIFPNYDPTAAIAPDYRKGLDTIYYRGLNVVYHKDNKRPNIRPSVLRQIVPIYPNYVYNINRVDQTYNQIMSMGYFKSANVIFNEQADSVAKDNYVTFVGEGKEPADSVHQTREGYLQCDIQCIPALKQGYKIELEGSTTSSFYGLRATVGYQNRNIFRGAESFDVSFSVGYEYMKTPSARKRNAIEFGVNMGLQFPRFLLPFRTQRWQSIQMPRTRLEFGINFQDRPYYRRTLSSVAWGYSWSDLKYSSYSLRPIDINVIDMGYVNREDFLDHLQNEYLKRSYESQFISGLSFSYVYNNQRKHLGGNATLLRFNYEMAGNLLDGLMHLFSRPAAGKDYYEVFGLQYSQYFRADLSVSRKIMLGEVTALVGRLYGGYGMAYGNSTSIPFDRLFYAGGANSMRGWAPRMLGPGAVPEPEDAVFPTQLGDMKLEANLELRFPIWGMFHGATFVDVGNIWFADRHSAPSPAAVFHFDSFYRQLGFDAGIGLRLDIKFAVLRLDWGIQIHNPNAPAGQRWIHNFKWKNTALNFGVGYPFMKTLLAKHRSIRKFRSEPIAPEVLQDMLEAASRASTCGNMQLYSLIVTQSRELREALAPCHFNQPMVTQAPCVITVCADVHRFSMWCEQRDAEPCYDNFAWFLNGVTDALLAAQNLCVEAEAHGLGICYLGTTIYTAEEIARILDLPKGVIPVTTIVVGHPDESPELTDRLPLDAVVHCEKYHHYTSSEIDELWAEKETSEETRRLLEENGLPNLAQIFTRNRYRAEDNLAISRNYFALLKKQGFFNNMRFAKYEGAGNDFILLDLRNGGATPQSAEIARLCDRHFGIGADGLMTLAASAVSGCDCSMRYYNADGSPGEMCGNGGRCFALFAHHLGIGGDIKRFDSTDGIHEARMLRIDGLRSTVELGMIDVERIDRGDGYWFLDTGVPHYVEFTDDLEAVDVIGRGRRIRYDKRFAKGTNVNFVKVVGPGHIAVRTYERGVEDETLACGTGSTAAALVTHLAAQPSVTAFRIDVRGGRLGIAFDEPKPGIYTRIRLSGEARKVFEGSYDTANFQSMKTNKGFRDENHADELRKAKRLEPIHKSGKERHTIYRELDDEEDDAPARPKRESAFDYFDDEENMVEKFITAGDTPVHVCDSEKGDRCAVLLHGYLESMLVWDDFVPYLYKQVRVITLDLLGHGISVVKGPVHTMEYLADVVKDTLDALGIARCTLVGHSMGGYVALAFCEKYPERLDGVVLLSSTPDADTDEKKENRLREIKLVEAGKKDALARVAPEAGFAPENRPRMRDEIEDLVEQVFVTEDEGIAALLRGMIERPDRNEMLRRSAVRQLFIFGKHDGYIPLEKAEALAAAHPQARIAWLEHSGHMGFLEEPEITARALLDFMGTENEPESRMSVVKVGPDDFEELAEVWEASVRATHDFLSEADIRELRSLLPVRYLPAVELRCLRDAGRIVAFIGLNGSHIAMLFVRPEYRGRGCGRKLVEWAVARQGADSVDVNEQNPQAVGFYLRMGFAVVGRSETDDADRPFPILHLRLEKMQLYKKRIFVEQNYTSSMKKEEKVRLPYVPTYGEEVANTVSHAVMLPLTLCLLPFAAVWTYLHDARPVLASVSVSVCVISIFLMLLASTLYHSMRPDSKHKAVFHKLDHIFIFVAIAGTYTPVALLVIGGWQGVFVTVLQWTAVLLGILYKTLARRSIPALSLTIYLVMGWTAIFFLPRLIRNASLPLLLLILLGGVLYTAGAIVYAKKGFRYHHLVWHLFIDLALLSHLAGIVFFIGMDLTRYDKLRSAIRRTLSPDEAAAADRALEYAAEHTASQVRHDGSPMLDHAAEVARIGLEEIGLGGDSVVAAILHDVVRTASRQDEETFLRLTDEIRDRFGKEVLGMTVSLSHISDIRLKASREQAENFRELIVSYSEDPRVILIKLADRLEVMRRLEIFPREKWRKKSWESLNLYAQIAHKLGLYNIKSELEDIALRYLEPQDYQHIADKLAETESERRAFIARVLEPITQRLDQAGLRYHVKSRTKSIFSIWNKMRKQHVPFEGVYDIFAIRIILDCPLEEEKQQCWTVYSIVTDFYTPNPERMRDWISIPKSNGYESLHTTVATKEGRWVEIQIRTERMDAVAERGIAAHWRYKGVNAGSDGSEMWMKQLRELMEDKTRPLAQNFDAKPSSGEIFVFTPGGDLRKLPEGATVLDFAFDIHTSLGLTCSGGKVNNRPAAIRDVLHNGDIVEVLTQKNQKPKADWLGFVTTSKARTRIKASLREEHTKNARLGREELERKLKNWKLPLTVDEGVGILCKHFKLRTGTELYASIGTEKIDLMQIKELLQAHLSGEAEEERRAAAAAIESEKRRKAEKVSTQSSGDALIIDEKIGQLDYKLAKCCNPIHGDEIFGFITVGAGITIHRTDCPNAQRLRRNYPYRVLEARWRDEAQGAFRVSIRVVASDTTGMINHIAEVINRDLKLSIRSMNLSPGGGLLSGVIHVEVPGTGMVDMLIHSILRIKGVQKAYRVNNMKISGTILKGVGMDARQGIEGKGDSLLLWQMTMTCCLDFLRLGSDFRAGVRIVRSAEVRCKFPDMGPEQVYGGVSEMVTLDMIRKPVEGDLEAFEQFIRQKFTADGTLLSEMLDYALSARGKGIRPMTVLLSAALNAPAGQRSGGLRALLAATLVEMIHVASLIHDDVIDESDMRRGRASVNARWQSRNAVVVGDYILAKNMDLGLKSGQFDLVTHVCGAIATLCEGEILQNDKANRQEMTRASYLDIIYKKTACLIGVSASAGALAVGASREKQALMRKFGESIGMAFQIQDDILDYTRTARTGKPSNNDLREHKVTLPLLTVLESVGEERRRELLARLARCHEEDESVEYLQHIVENEGGMEKAARVMQEYLTRAMSVLSEYEPSEYRDALANLCVYVGERDRMTRFKEILPKVLPTGAALLLFFIVSALYFAPQFRGEVLPQHDVQQYEGMAKEIWDNRAQTGEDPQWAGRMFGGMPAYLINVAYPAQLVKNTAGQIVKIINTPAAFVFFAMVSMWLMLPIVGVNPWVGIIPSLMYGLSTYFFLIIGAGHVTKMWALVYAPLMMGGAWLTLRGNMWLGGALTALFASLEIGANHPQITYYFLLAMAALWISEGIVAFRKKHLPSFVRRTAVLLAAGILAVGSNFAPLWYTMHHSKQTIRGGSELAAGEETSQEGLALDYATAWSYGRAESWNLLIPDFMGGDSGRAFTRDGKVAEALKPYGLEGIAEQLPAYWGQQPYTAGPTYLGAAALFLALLGLLLASGRNKWWIAAVSLLTLLLAWGHNFMGFTEFAFKYLPGYNKFRTVSMALVVVEWTVPLLAALALMPLWRGEVPRRKLLRALAWAGGITGGFCLLFAVAGSAIFDFGRTEAADFMSRQYYQMFQAAGMQEAIAQGAPEELGEVTADAMAADRAAIMRSDAWRSLVMIALAAGSVLLFALGRIRRGWLIALLGVIVLIDLVPVNLRYLPQSRFVAARRQQIQPTEADRAILRDPEPGFRVLNLTVSPFNDATTSYFHRSVGGYHGAKLARYQDLIERYLTSMDEGVLDMLNTRYLIRFDPTGQPVAELRATANGPAWFVQEVVDADTPQKEIDALGRIDTKTAAVINTREFDIRPLIGGEGEIRLEEYRPNYLRYEYTATAPGTAIFSEIYYKDGWTAYIDGIETPYFRADYLLRGMELPAGTHTVEWRFRAPGWNVAEGVTLASSLAILAGIIATVILVLRHERRQKTQAMKDDKRLKRKVRNSYIVSNISIALVLFLLGSVGYLMTAAMQVARTLQESVTVTVELRNGADEKQKESLRKRFEANELVSHVEYSSKDDKLNDTDFRQMFEQEFEAILEENPLLDSFELTLSADSADPDKLETFIAQIAELDGVDRVSYPAQTVERLHATIAKIRLVLLLFGGALLVISLILLNNTIRLAIFSKRYLINTMKLVGATKWFIMRPFLGSSITQGILSGIIASALFLTAVYGLNEAVPELMSLAETMKIGIIVGGMVLGGILISLCFTFFAVNKFVNMKSNKIYLYMKKFKEINDKNDPKMPLSLKNYILLLAGLIVIILGFVLMAGGGSDSPDEFNYAMFSWRRITLAPILVIGGFIFEIYAILKRFMETIQAIILGIVQGLTEFLPVSSSGHLQLAKELLGVDPEVGGLTFDLTLHAATVLSTIVVLWSEIKRLVVGLFSKRFNAEQAYVLKIILSMIPVVIVGFTLEPFLQSLVEDLPNHGILLLVGTMLLVTAVLLTFAYYAKPRHKATISYRDAFIIGLAQAVATLPGLSRSGTTIATGLILGNRKESVAQFSFLMVLAPILGKMVLDLMSGELAAQSIGTAPLLAGFAAAFVVGCLACKFMINIVKRGKLNWFAIYCTLVGGLAIIRYFVIQMTQQSELNLQGIDFEEGYIAVIDKPLEWTSSDVVRKIKFALRRAGYPKIKVGHAGTLDPLATGILLVCIGKATKMADALQAEEKEYVADLMLGATTPSFDLEHPIDRTYPFEHITREAVEEVLRSLTGERLQTPPLYSAKKVEGVRAYELARAGEEVELRKALINIYEMELMEYDLPRIRIRVRCSKGTYIRSLAGEIGQALGSGAHLTSLCRTRSGGFRLDAAHELNFFLEKLQKAETKMKLSQYGYDFSADLLAKYPAENRDESRLMVVNRAKGTIEHRIFKEIIEYFDEKDLFIFNDTKVFPARLYGNKEKTGAEIEIFLLRELNRELRLWDVLVDPARKIRIGNKLYFGDDDLLVAEVIDNTTSRGRTLRFLFDGSYEEFKETLFKLGETPLPKWVREKVEPEDAERYQTIFASKEGAVAAPTAGMHFSKHLFKRMEIKGIEKAFITLHVGLGNFRTVDVEDLSKHKMDSEQFFVDEPTAETVNKTKREGHKIVSIGTTVMRTLETAVSTGGMIKPMEGWTNKFIFAPYEFSVADAMVTNFQLPYSTQLMMVSAFGGYDLIMNAYKIAKEEGYRFGTYGDAMLILMASNRILYVCQEVAPYVPDTEGALLCRRLSQAMQERGNEIRTFMPRYGCINERRHQLHEVIRLSGMNLIIDDNDHQLIIKVASIPSARVQIYFIDNDDYFARKAILRDADENYFEDNDERAIFFARGVLETVKKLRWTPTVVHCHGWFSSIVPIYLKKVFADDPIFKEVKIVVSLYGDGFDKPLDAGMKEKIANEGVKDKKLSILDTPSYENLCRYVMEYADGIILASDAVTPEIIELVRNSGKPLLEYQSPDAEDFFDNYNRFYDSIQMIRSSKIRRAAELAAVLTAAGMVFFTGCTKVDDRLGAGYQPGDQQMKIGLKVFALAPDAERPYFETRLYKTDSLKASNLGEGYFGVMHDETFGRRTAGFLTQYRAVALSDTTGFGYQPIFDSIELKIKISNYGGDTLKPMTYNVYEVISNDYLNPSLTAPAGAGSVADTLFYPTFDPTPYLNPNPVFTFTFPNGTTTGPATEYVTLQPTPEGRGLIKRLMLLEGKYKGDMTIYRNPELWVDYFNGIYIKPAQENPSGEGNLFATNLAESGLLMYTRSRNRTDPTLIQDTITASYLFYREDDPYGNVSINTIRHDYTGSKINPADIDERNEQRPLNPNVYVEGMDGVITELTLTDALFEGIEALYKEVTDESGMPYTSIAINQAELMIYLEKSDYDWEKIDVGAITPLLDASFERLGLYADYKHVLGISDYYYTYERLYSSQNFQLPYGGYLNRSQGCYVMDITSHLQEVWNGYLKSQGIETGGSQTENPAPRTIYIGPEAYGLFTMPYTSAQGMENTANNAPIKLRLIYTMIKMQENLVIVESPAKAKTIEKFLGKDFVVKSSFGHIRDLSKKDLGVNLDKDYEPVYEIPSDKRKVVEELSSLAKKTKTVWLASDEDREGEAIAWHLAEVLGLPIDQTKRIVFHEITKPAILAAIESPRTIDMNLVNAQQARRVLDRLVGFELSPLLWKKVRPQLSAGRVQSVAVRLLVEREREIIAFRSTPYYRVVAQFYAAADPDKTLFKAELSTRFDTREEAETFLRSCIDARFTVAKAEEKPAQRYPAPPFTTSTLQQEAGRKLGMSVSQTMSVAQHLYEQGLITYMRTDSVNLSKQAIGQCKEEIIKLFGEKYSSAHNYKTKTKGAQEAHEAIRPSYIERQTIEGTPAEKKLYDLIWKRTVASQMVPAELDRTTIVIDISGSDAQFVATGEVIRFDGFLKLYSESTDEEPGEEGSGILPKMAQGESVNPAQITATERFTAPPARYNEASLVKRLEELGIGRPSTYAPTITTIINRGYVVKQNKEGQKRSYVQLTLTGSKIAEKRLTETYGKEKNRLQPTDIGMVVNDYLESQFEPIMDYNFTANVEKEFDRIADGEITWNSMIDDFYGPFHKMVDHATTTQTTKNNQIRILGTDPTTGHTVKARIGRYGPMVEIEGNEGEKSRFASLKKGQLIESLTLEEALALFSLPRNLGPYEGEDLVIGIGKFGPYVRHGKSFASLARTDDPYTIGYDRAAELVREQQARAAAANTPLKTFAEEPELLIKNGRYGPYIAYKGKNYRIPKGTKPEEITLEACMKIIQTSKKMKKLLLLAGLALMVCSASAKKPAQKTQEEGYKFTDLTTVPTTSVKDQHRSGTCWCYSALSFLENEILRAGGPEMDLSEMWIVRNMYFDKGVKYVRLHGHLNFAEGGAAHDVIEGIKKYGIVPQEVYPGLNYGTEKPVFGELDAALKAYLDAVIKARNNGVLTTAWQDGLNALLDTYFGVRPEKFTYEGKEYTPESFAASLPIKMDDYVDVGSFTHHPFYTEFIIEVPDNWMWGTVYNVPLEEMMAVVDNALANGYSIEWATDVSEKGFDRIKAIGIIPETDIDGMEGTEAEKWGKLSAAEKEAALYKFDKPVKEKKITQEMRQIAFDNYETTDDHGMVIVGTAVDQQGNPFFKVKNSWDVRPPYDGYYYFSRPFVEYKTLSVMVNKNAIPQEIRTKLGIMKQAVTPLRLGSDRISSLLVRYAIPSIIAMTSSSLYNIVDSIFIGHGVGPIAISGVALSMPLMNIASAFGSLIGIGAAALTSIRLGQGRREAAEGVLGNVVLLNFLVAALFTAVGLLLLDPILCFFGASDATIGYARDFMQIILGGTIVTHMYLSLNEVIRASGYPRRAMTIMLTAVVLNCLLNPLFIFGFGWGIRGSAAATVLAQVAALSVSLIHFSSRGSFIRFERGIFRLQASVVGKIFSIGMASFLLHLCASAVVIVVNKSLREYGGDVAIGAYGIIYRVAMLFLMIVSGLNQGMQPIVGYNYGARRYDRVLKVLRQTVVCAVCVTTTGFLLGQLFPRQVAMLFVDAADGAAAERMISTAAEGLRIVLCVFPIVGFQIVTSNFFQYIGKPHKAIFLSLTRQMLFLIPLLLVLPPHLGTLGVWMSMPIADGTASLLAAVLLFYQVRKFRHRPHAERSIMDNILCIEKVLSWERLLRLVPERDLRLAAALKPASRREEFLMWRSIVYRRLPDAEIAYNAVGAPVVCNYPLHIGVSHCPGYVAVCFSDRPCAVDIEPLARDFGRAAVRFASAEERQLSDSPLLLPALWCAKETLYKYSGRRNLDLLRDLRIERFDPDEGRMTGRICGESALEIGLRREEELLAAYILVMEDSAAAIIYHGMTFHVVVLCCVTLFLLLVSALVSGSETAFFSLSGNDVRKIRRHDTPVCRRMLNLLGKADLLLATILVVNNLVNIGIVILSSEIIDSLFTFARFEFLFKTVIVTFLLLLFGEILPKVAAQTIPLRFAGFAARPLLVLRWIFYPLSYVLVRTGNRISERAAHHQEISIGELADAIDMTRTASKEEHGMLSGIVSFVNTEVQEIMKPRVDITAVAITDSYEQVKQTIIRSGFSRIPVYEGDLDNIKGTLYVKDLLSHIDRGDEFGWQQLIRRPYFVPEHKKINDLLADFQNQKIHMAIVVDEYGSTQGLVSLEDIVEEVVGEISDESDKDEVFYTRLDKDTYLFDGKTHIGDFERIVEIAEGTFADVKGRAETLAGLMLELKCDFLKKGDTVTAHGVRFTVEEIEGHRIDKIKVRLHGMTDDVMTQLAAARTNPSIIMVVGVGGAGGNAVNHMWNLGIKGVDFMVCNTDQQALDKSPVELKVRLGSEGLGAGNDPENGRKAAIESLDVVRQRFEASGTKMVFITAGMGGGTGTGASPVIAKLAKEMGMLTVGIVTSPLAVEGKIRYEQAFRGIEELRQNVDSLLIINNENILEIYGRLALKQAFGKADDILASAAKGIAEIITVESDLVNVDFADVSKVMRDSGRAHMSVATAEGDNRAEAVAEASLHSPLLDHNLISGARNILLNISVANAEELMYEEVVRILEYIQAHASVEDESGNIHNANIIWGTSEKPQLGNAIELVVVATGFEGDEEKRMMKTVIPPARIVKPVPEGGDPAGKPVLEPVGKPGKATPQTRPLEQVILGEKSTRYSNIDQILAKPAYQSRKAQFIVEMPAGRKEVLKEEKGAAERAEENRSESLFDMEKKSYTVAIDLGSSNVVVAVGSKREDGTLGIEAVVSKPVEGVKAGRIDNIEQAGNAIREAVAEVESTLGVRITEAYAGISGEFVRCARHTDHVFTYDPQNGVNQGDVDALFDRMRNVQAPDDETIMERIPQHYMVDDAEEVRNPVGSFCKRLSSTFNFILCGKTPLQRLDMALRRLGIRMLGVFPNALATPEAVLSSDEKEEGVAVVDIGGGVTDVAVYYRGVPRYVATIPMGASAINRDIRSQSIPEKHVESLKCKYGSAVAELAPEDKLIRVSGRTAREAKDILLRNLATVIEARATDIVEFVQQEIRDSGYAERLAYGIVLTGGSARLKDIDELFRRVTGMDVRIASAETGISEDSREAVANPAFATVVGLLLKGAGMGSCNVIEDKAGLSPRRPVPPTSVPGFQPPQPQSRPQPQPYAPTRPSTETVNAAYARREAARAESAAAEPEAEDAGEDPAPQAPVQEPVKKERNWRSIFKRTLDKINEGFNAADDEEIMPKYLKYTLLALLWGGVAAYLLYAGGKVRRHRAEQPVTRIEVEVVDSTSQLRLVSEATVRGWLARSGIKTVGEKIGAVRLDALERLIARNGFVADARVTVSYSGVLHVAVWQRTPLMRLLIDGYNSYVTEEGYLFAVPRASSVYVPVITGTYRPPFPASYVGYAADYRREQMQQIDDKIAELEREKYPLYRRELKNDENIRSLRRMLIKKRWFESSESFGERVRELRKRKEQLRRKYRYEAQVIQSAIDKISEKQEAERRRQKILEKRYEDFSKLTTFVKWMENDDFWRSEIVQITARTTESGAIDLELTPRSGNYTILFGRLDDAEQKLDKLLRFYREGLGKAGWDRYRTINVKYAGQVVCTEWMKEFSTIANVTSGREERRTCSTAAGCGERRERLNVYFLGIGGIGMSALARYFLHEGQRVAGYDRVRSHLTDQIEAEGAVVHYEEDPALIPADFRDPATTIVVYTPAVPADHTELRWFEEHGFEIVKRSQMLGYLSQGKFVMAVAGTHGKTTTTTLVAWLNHRVTGGGSAFLGGISRNFSSNLVLGRGRRLAVEADEFDRSFLRLWPDVAVVTSADADHLDIYGTHEALREAFSQFVGQIREGGALVVKRGVDLKIGNPGIRVYRYSYDEPCDFYARNVTLLEGGHYRYDLVTPGGVVEGCTLGIPGWVNIENAVAAVAALWCASERDGEPLDAERLREALASFEGVKRRFEFYVNTPRQVYMDDYAHHPRELAAAITSVKKMFPGRRLTALFQPHLYTRTRDFYREFAEALSHADRVVLLPIYPAREEPIPGVESEMIGRLLTVPWTICDRAELAEKVAAMDTDVVVSFGAGNIDACCGALAEKLREKAMKRVIVSGGGTGGHIYPAVAVAEALRRRFGEEVEILFVGAEGKMEMEKVPALGYRIVGLPVAGLQRRFDLKNLAVPFKVLKSIRKARRTIRDFGADVVVGFGGYASGPVLWAAQRMGIPTVIQEQNSYAGVTNKLLAKRARTICVSYEGMERFFPKEKIVMTGNPLRGRFSKAGADRREALAHFGFRDDLPVLLVVGGSLGTRTLNEMMKVWVLRQGDASPVQVIWQTGKYYEREMREFLAQHPTANIWQGAFIDRMDYAYAAADLVVSRSGACTVSELCLVAKPTLFVPSPNVAEDHQTKNARALADKGAALLIPDSEAVARVMDEAVGLLKDPARLSELSRNIEALAIPDSAERIVNEIEKQLPQSKMKKWKPERRDGLLLLGIGLGAAVGLLRGAVLAWLPVGVALGLCLRGGAGTRSGSGKDSLGDISDKNQEFYAGGDASAEAGNENKIMFVSTYAGAVAGIDAVKVTVEVNLTGGGLGLYLVGLPDNAVKESEQRIRAAFENTGRKMSGRKVVVNLAPADLRKEGAGFDLPIAVGILAAMSEVSGELLPTTMFAGELSLDGTLRPVRGVLPLAVKARDEGLRRLVVPAENAAEAAVVEGVEVYGLHSLGEVIALLNGERRFDATVPVDAEATLASQSAYAEDFADVKGQTAVKRALEIAAAGGHNVLMIGAPGSGKTMLARRMPTILPPLSVEEALETTKIHSVAGKLGAERGLLSQRPFRAPHHMTSQVALIGGGQSPQPGEVSLAHNGVLFLDELPEFGRSVLEVLRQPLEDKKIMVSRARYSVEYPANFTLVAAMNPCPCGYYNHPTKECTCPPGAVHRYMGRISGPLLDRIDLQVEVTPVAIGEISQVRPSEPSAAIRERVIRAREVQAERFRGVPGVHTNAMMNARMLREFCPLDQAARELLERAMVRLDLSARAYDRIVKVARTIADLEGTADIGAAHLAEAINYRSLDRGSWGRMAKEYTPASRNREAFAAMTDTPGNVPPQAVELEEAVLGALMLEKDSIITVQEFITPEAFYTEEHRTIYRAIEELSTELKPIDLYTVTERLKVRKELQKVGGASYLAQLTQKVGSAANVEFHAKIIAQKYVQRELIRSATEIQRRSYDESTDVTELIGYAESEIFKVAEGHVKRSVQSSKDLLAKALMQIEEASKNTSAFNGVPSGFMAIDRVTLGWQLSDLIIVAARPSMGKTAFVLSMARNMAVDHERPVAFFSLEMSSVQLMMRLIIAETGIPGNDIKSGRLTPEQWRHLESATKPLGAAPLYIDDTPALSVFEFRSKARRLKIHNDIQIIIIDYLQLMTGGTQDSKGNREQEVAFISRTLKAIAKELNVPIIALSQLSRATELRGGSKRPQLSDLRESGAIEQDADIVAFIHRPEYYGINQDENGMPTAGMAEIIIAKHRNGAVTDVNLRFLKDQARFADVDETLMPEAGSRPAPGQYEDVSSGSNSGLGGFGGVPEEFLTPGVSGAPVNLNEEEPFMRDSLIVFVFFAVGVALGYADAVPTWLLDPDLPMIILSVMVVLVGLGLGAGDNLHYMLRTFNWRMLLLPLCTIVGTLLFSALGVLVLRGFSLTDCLAVGSGFGYYSLSSVLIADLKSATLGVQGAAELATVALLANVVREMIALFGMPLFARWGGPLAPISVAGVTSMDVCLPSIARYSGSDLVPLAILHGIVLEVCVPILVGAFCMFRIVLLLFAGIGAGYLLRNWSFVARLERGVSLTVWALLFVFGVTIGSNRELIVNFGRFGWQAAVIACLGVAGSFAAVFVVRRYFFRKGGSDERMSILNDIKGLFLPPVCPVCGGELHEGEGAFCMMCRTLAPQTGFWRRADNPLAERLRNEFPVVQASAFLWFVAGSPWQRAIHGFKYYNRWRTARDLGAWYGGNLADSGLYGSVDCIVPVPLHTRRLLARGYNQAAYIAEGIASRMGVPVEDRAVSRLRNNPSQTTRSSAGRWENVRDLFAVARPGALAGRHVLLVDDVVTTGSTLLSCTEALLRAVPDCRVSIAALAVSRRHFGLDRMRYADIVLPLAQPLYTFAVAEGVTLCEGMAVVVPFGRSKIYTGIVWRLHDRRPDFKTVKTVSRVLYGTPLLDERQRRFWEWVADYYMCTLGEVMRVALPSLMKPSGHGEEEFAADEFRPRREWFVALAGEALTADGLAAALERMGRRAPRQREALEELAALAPDGAEVARSRLAADRTALALLVKKGLLTCIEREVAPGPVTGGAQFRLPTLSAAQRKAAEEIRAVFADRATVLLRGVTGSGKTEIYMHFAAEVLARGGQVLLLVPEIALTAQLVDRLRQVFGERVIAYHSKLTDRKRTELYLRLRDSAGGELVIGARSAIFLPLRRLELVVVDEEHDPSYKQTDPAPRYQARDCAVLMTRLLGCRTLLGSATPSLESYLNAATGKYGSVVLAERYGPSRMPQILVSDTIRAVKRGERHAHFNKLLLDRMEETLGGGGQAMLFQNRRGFAPYVECRECGWTARCPDCNVTLTLHKGSGRMVCHYCGHTEPVPAKCPHCRVTEPVPMGFGTEKVEEEIARVFPEARVARLDRDSVTSERAFRQIVEAFARGDDDILVGTQMITKGFDFGGVELVGVLNADNLLNNPDFRSAERAFQLLMQVAGRAGRRENPGTVVIQTAEPGHPVLQQVIAGDYEAMARQQLAERKAFFYPPYARLLNLLLRHRDPVTLRRAANALAAALRERFGRRVLGPTAPPVDRVRGEYLATLLLKVEAGASLARAREAVRGILDRVVKSPECKGVTILCDVDPQMLSGCGTDRPVRSRAATAKRRNQFGFSSGKVTHYSRKTNTPRRIDEEYYFKSKKIPMKEKITFGTIMGVVREYFVMTIGILLYTFAWIACILPAHGTGGGATGAALVLCGAIENLFNFQINIGTMAFIVNGILLLFAGFIIGWNFGIKTIFCIIVLPASLNFFQETLPGVQAWLAELGVIPPDAISLFGNLEPLLLVIMGGMLSGVGIYMCFRQGGSTGGTDIVALLINKYHPINYGRVVLVTDSLIICASLLVGNGIETVIYGFLLTAVFGLSTDALLAGNQQSNQILVISHEHDRIAAEIVEKAHRGVTMLNGMGWYTKESSQVVMVICRKRETADILKIVRNLDPKAFVSVASVTGVYGQGFGIIDGGMLNGMKKNMETRVYSWGDGRPWHSYAAYCRRHFGGRVRKIAVDAGLSCPNRDGTIGSEGCTFCDNRAFTPSYCSPRKSLARQIDEGIAFHAARGRDEGLCLAYFQPFSNTHAPVTRLRELYAEALDHPRISGLVIGTRPDCVDDEKLDLLAELARKHYVAVEYGVESTCDETLRAVRRGHDFAAARQAIAASAARGLHVGAHFILGLPGEDDEMLLRQVERINALPLETVKFHQLQLVRGTALAAQYDAEPGRFRLRTSEEYLSLVVEVLRRLRPDMAVERIASEVPMGFHHLTQWHLTRVSTLWSLLEKRLTARNAYQGEIFIPLRRMKKYFLCMVALLSLAIVACESDDTAPAPTVRPTFDLIDAQPDVTSAVVAANIESKGEVPISEVGFSYQEAGGEYVDVVCTNFKDGLARQTLTGLKPDTEYRWYCYAVLGGERFNASLSKTFKTLKEGEVPPAPTPQFGKPSASEVQATSASLACAYLYTGDAADIAEAGFGYKPAASAQTGYTMVEITPDDSSLSARLEELTPETAYEFYAYLVIDGKNYTSERVVFTTLKEGEQPGAPQFETPSSSGVSPTGATLACVYEYEGDGDVAEAGFGYKAGAQEEYTEVKAASTASPLACELNGLEPETKYDFYAYVVVGDERYTSAVAQFTTLKAGENPEPEFGPVAATDVTASSATLTGSFTYEGEETVGIEVGFAYKPSGETDYTTKTVTASSGDKRAAITGLSAATTYTFHLYASIGGKQYRSEEGTFTTESGTVPPPENVYRTGWAELPVEVQNSDYYYAHHICPDFYVGSQKARNYTVCFSAEHHCPVWVAAPRHACYEVKGTDRTDAYSRDPDIPSGIQYSSKSTGGGCNKGHMLGSAERLVTRKTNEQVFYYSNIAPQYSSNFNNGGGAWNNLESFVDAQVCADTTYIVVGTYFEPFTDAYGKSCTSSKIDFGGRSDVSRPSMFYYLLLRTKNGNTKKSVMDCAASELKCAAFVLRHNMDKGHEPQAKDMMSVAEIERLTGFTFFANVPNAPKDTYNPSDWGLMTSVISKIVKDERNRAGLHAEIAESHPIRGYVKDIKSSLMRILIQRVRRASVSIGGTLKSAIGPGLLVFVGIEAEDGEEDIEWLAGKLTRLRIFDDENGVMNLDVRQVGGEILVVSQFTLHASTRKGNRPSYIKAAPEAISRPLYERFAAGVGRALGREVATGEFGADMQVELVNDGPVTIWIDSRQREMFAPEDILYEDNHLLIVNKRCGDLVQPDPSGGDALERQIKEFIRRRDAKPGEVFLGVVHRIDRPVSGAVIFAKTSKALARLNEMIRRGEIKKTYWALTESRPDPEEGELCHYILRNEKTNRSRALDAPRGDAKLAKLRYRTLGASARYTLVEVDLLTGRHHQIRAQLSKIGCPIKGDLKYGARRSNPDGGISLHSYRVDFIHPVRRERIVVTAPVPKEDNLWAFFARQFSLLPCEFMENRFSFDYQHYDSPEGMPAGDRELVEEARRAVARAYAPYSKFRVGAAARLRSGKILCGSNQESEVFPAGMCAERSLLFHAGACHADDPIEALAIASEPSERECYPCGQCRQVLLDAERRQRSPIRIIMSGAGGATVVDSAVRLLPFTFQLMKRMKKWMILAAAVVLAAPVFAQTQEAFPSYIQVNGRSQMEVTPDEFYLSIVINERESKGKITVETQQRQMIDALKKLGVDVEKQLKVANMSSDFYKKASSLTTAKYQLLLHSAAEVGDVTAALGDLGISNVGIVRVTRSDIDSLKEQVRLDAIHNAKSSAEALAGAIGQKIGKCFYIYDSNYDVAPQYYDNMMMVRSKAMMADSAEAGAPEEPSLDFKTIKLEYNVQTKFVLEMARKKANYPLIEGLEITTLAAEGKAMGRYNDVVVFVPMTVPGDVVDVQIRSKRRRYMEGFVVNYVKRSPLREEPFCAHFGVCGGCKWQNLPYAEQLRFKTEQVRDQLARIGKVELPEIAPCLPSAETRFYRNKLEFTFAERRWLTYEEIAEKGEIADAPALGFHIPGMFDKVLDIEKCWLQPDPSNAIREETRRFCLEHGYTFHNPREHRGLMRNMVVRTASTGEVMVIVVFHADEREKIAALLDHLAAAFPEITSLFYVINEKFNDSTGDLEPVCYRGKDHIIERMEGLQFKVGPKSFYQTNSAQAYELYKVARDFAALTGKEILYDLYTGTGTIANFCAARCAKVVGVEYVPEAIEDARINSTLNGIGNTVFYAGDMKAVLSDEFIRRNGRPDVIILDPPRAGVDEPVIDVILRAAPERIVYVSCNPATQARDLALMDGAYRVEAVQPVDMFPHTHHVENVVKLVRRMKIRLLKIFAAVAVLLSFGSCSLLKVSVDTGNPPLPASEANTRMMTRGFYYDLADEIARTADSVAAASSEIPVRIRAIRWKMQATRAAVTAVMQSNPDVALIDTWLLCVRMDSAFRRLPDSLLFAGQTPLVRKVVARLDKKAEHLASTLLAPEKFALMQEFVGNYMQANPVTGSQFTPVNTTLPWIEFLQSKGVETQYNVGSISDVIADLGDRFGGQSEQMVNSIGWSKDIFELQMQQDSVRNRLTRQLDSLERNFDRIVTVMEHLPQIADYMGKSLNTEVAALIETLNGAVDNAFADLDRQRAELQGYISAERKALVDQAQQAVDAAVQNAMDRVPALVAKLLAWIVLFAVIMLGVPFGIGFWLGRVRERAKTRKTGGAMICEIYLRYKYSDISRIIAIFGTGAPERNGAAGAGAEVLEQMKIACLTFNPIQENTYVVWDDTKECAVIDAGNSTPKEDAALDGFLAEHGLKPVLAVNTHGHFDHVLGVEHLRKTYGIPFALSGKDAFMLDTDAVGSTVYGVKINAMPTIDIDLDKVEEVKFGHTVLRVIRTPGHTPGHVSLYEPESKSLFTGDTLFRESIGRTDLPGGDYSWIMRSILDNLLPLGDEVRVYPGHGPETTIGHEVLYNPFVTEVLNQEVNYKNMKALLHKILYRTLPLEGYLRAVSRLFFISYRLGLGRRSAATEYVYHLPRLAKAGDTAIDIGANLGYYARPLSEIVGTAGRVHAVEPVPVVCRVLRRNLRGCRNVEIFDCALGAENKEITMSNDSARETGYLGTGRNFVGDAAGEGAVTFTARMRRGSELFAGLERLDFVKCDVEGYELIVMHELRPLLERFRPTVLIETGGENRPQIIELFTELDYKGYTLENGREIPLAPDTEKDIIFRQARMRIDILTVVPELLASPLNESILKRAQEKGLVEIHIHNIRDYTEDKHRTTDDYPFGGEAGMVMKIEPIYRCIEALKAEREYDEVIYTSPDGIRYDQHEANRLSTLDNLIILCGHYKGIDYRIREHLVTREISIGDYVLTGGELAACIIADSVIRIIPGAIGDEASALTDCFQDNLLAPPVYTRPAEFNGWKVPDVLLSGNFARIDRWKEEQAWERTKRLRPDLLKEEMRYYLIAGEPSGDLHGANLMKGLKAHDPEAKFRFWGGDKMAGVGGSGNLAKHYKETSFFGIVEVIKNLRTIRRQMKECRQDVEAFAPDVLILVDYPGFNMKMARWAKEHGIRVFYYIAPKVWAWREWRVKAIRKYVDELFIIFPFERDYFPKHGIRPIFEGNPLVDAIEARRASLPSPDEFRRRHALDERPIVALLAGSRRSEIKANLPLMADLARKFPDRQFVVTGVSWLDRSIYEQYIADSGIRYVCDQTYETLAAAEAAVVTSGTATLETALLNVPEVVVYRTLWFQVKLQPYVLKVPYVSLVNLNLGRESVVEIIQSDLDITRAERELRAILTGGEKRERMLRDFAELQAVIGAPGASDRFAARMVELLKKQVRMRELFTTYPTQLLGGGLLVLLGILVRFFPNLIAGYNTMSAEQKKNVDVKGLSRFMCLSLAAIGIGWIALGMLAGNLGGEKWVLAVDFLWLPAGCVFLLVKAQKYDRNKSFVTDIRKNLIAPNGVAVVKGSSNYAVFTGDIFEVLIGKAGLRIQNGYVYKRDTDHTTWTKIMRTPISYYGGKQTMLKHILPLIPSHKIYTEAFCGGAAVLFAKRPSEAEIINDINMELTNFYWCMQVYYSDLKHEINKTLHSRDLHAHAGHINSYPQFFTPVERAWAVWVLCKMSFASMMDGTFGYDFSGTMTKKLRNAKEEFTERLCQRLERVTIENRNALDVIACYDAPDTFHFIDPPYVNSDCGHYEDTFNEQNMEQLLQLLETVKGKFMLTMFPFDMIDRYARKNGWIIHRIERTISASKSNRRRQEEWMVCNYEERAQASLFEGEYLGEMDSTKGYIHVYTGNGKGKTTAAFGLAVRALCAGKSVYIGQFVKSMRYNETKIGQLFDQVKIEQLGRGCFIGKDPEAIDIRMARDGLTRCAALLESGEYDVVILDELTIALHFGLLTIDAVLDALNRRHPAVEVVVTGRYAPQELIDAADLVTEMREIKHYYTQGVLSRDGIDRMNIILYGIPADTAELIAGRYDLELIHSIEEIGTCGALLPVPKITAPRQLLALYNALMRHEDAIDAVIICGSETCGAAGTICYGAPPGKIFTLCGDPGGEELEAELFRLLDAIFTQANRINLMAVTMVIAALSFVVHYWKYRCGRRGNLLYRNGTTIPVSGRFSMKRESGVNPGQSRCCEAPQRFEHLCHWSARTGKASEQEMKTKQELTDILDFVAEYASYLLGSGVHTSRVIRNAQRIGTSQGVDIQLSSFQKSIIITVHDERSGEVVTRVVKIPALPISFERNSDLSALSWDAVDEHLSLTDLRDRYGELIAKPRMDPIFVLLTVGLANASFCRLFGGDWTAVGIVFTSTLVGFSTRQWMQAHAVNHFLVFILSAFLASLCASSALGFDCTAEVAIATSPLFLVPGVPLINGVIDIVEGHILIGCSRLINALLLIVCIAVGLSATLMIVKNSLLMIAVDILLDGLFAAVAAIGFGAISDPPVRAFPCIALLAAVGHALRFCLMSYAGIDIATASLCAAVVIGFGSLWLGRGIRCPMTVLYIPALLPMVPGIYAYKTVFALIMFLQSLNDPGQGLEYMQQFFLNATVSFSVIILLAAGATLPIFIFNRRAFSLTRRRQNRKMDVFWNTIAAYNAATWPVQLLLVVVAAVLTLLLYLRPTRAVRVAMKVFMAALNFWIAGVYYFLYCAPREHYDILALFWTVMGCIWIYDLAAGHDSLGRTGRHSQFALALFCMPLVYPLFSLALGRTFPMMTSPVMPCSVAVFTVALMLAFSERANIVLATFLCHWALIGLSKVYFFGIPEDFLLACSVVPALFLFFRRYIRNRACESTKPSPRVLNALLAVLCAVIGVFFTFTLLHQFDLFTEIMIPYRAEDFSVTVSVADYIARFRDAERFEGCCRACPNYGCSWGCPPFDFDVEEYLNRYSRALLIATKIAPEQRDLPIAEAKRLIHPERQRLERRLLEMERRYGGRSFAYVGSCLYCPEGTCTRPEGNPCRHPELVRPSLEACGFDIGRTTSELFGIELKWGADGKMPEYLTLVCGFFHDGDGVVWMGQKLTKQDVRDAVQHAFEQTKAVTGGKNADYIPYLANVPSDLFGIAVCLPDGEIIAAGDTEYKFGIESVSKVPTAILTMNQYSPEEVLTKIGADATGLPFNSIMAILLEKDHPSTPLVNAGAIAACSMIKPIGKPDAKWEAIQGFIEGLCGSSVEVIDELYKSETATNFNNKSIAWLLKNYSRIYDDPDMALDLYTRQCSIGVTARQLAVAAATIAFDGVNPVTKQTVFKPDLGTRIASMMATVGFYEHTGDWLFNTGLPAKTGVGGGIMGVVPGVMGVAAFAPPLDDAGNSVKAQAALSDIVGRLNLNIFHPRKSILAEQAMDVKKATTSTGFKLSVMTLAIMNITAVVSLRGLPAEAVYGLSSAFYYLFAAVVFLIPTAMVAAELAAMFSDKQGGVFRWVGEAYGARTGFLAIWLQWIESTIWYPTVLTFGAVSIAFIGMNETYDMSLASNKVFTLIVVLAIYWVATLVSLKGMDWVGKISKWGGMIGTIIPAGLLILLGIIYISTGGHNYMDMSQGFFPDLTNFDNLVLASSIFLFYAGMEMMGIHVMDVKNPSRNYPKAIVIGSLVTVLIFVLGTFSLGFIIPAKDINLTQSLLIGFDNYFHYLRISWASPIIAVALMFGVLAGVLTWVSGPSKGIFAVGRAGYLPPFFQKSNKNGVQRNILLIQGGVVTLLALLFVVMPSVQSFYQILSQLTVLLYLIMYMLMFSAAIVLRYKMKGTARPFRLGKKGNGLMWTIGTVGFCGALLAFILSFVPPSQISVGSNTVWFSVLIIGCVVVVGAPFVIYAMRKPSWKDPQAAAEFAPFHWEVKAAPETQNIPQNNPQNTGNTAPENKQMHGTCNFTNRHEKTSFKQTDKTTFSRYKRNAGFLPDAAEPGKMLRYFFCLLALPVLLSCSGRKSAPATAPEKVPPRLFRVVAPPGAMDDAQRYAYLREHFWDDLDFADTVFIVSTDTIHMLRAFDTYIRNFVMESDPSPVAELMRKASGSKTMLEYFAMLAERVLHDPNSPLHSDELYIPVLEALVASPWLDEWEKIAPEHDLRMALQNRVGLPANDFRYTLASGRTGTLYGIRADYTLVFFNNPDCGMCERIRAEIVASPLLSEMIRAGRLEVLALYPDEDLTAWRAHAPQVPSLWINAYDAGARISKEELYDLKAIPSMYLLDRDKRVLAKDAFEVGYIEWLLDRQPQMAKKWRCTVCGYIHEGPEAPDQCPMCKVGKEKFVEVEEKAGGLDFVTEHKLGDGKGASQELWEGLNNHFMGECSEVGQYLAMARQADREGYPEIAEAFKRYAWEEAEHASKFAELIGDIVWDTKTNLFKRMNAECGACEDKMRLARLAKEQNLDAVHDTVHEMAKDEARHGSGFQGLYNRYFKAMNENQPRRHLITPIVVFGITALIAVVMLLWALVIWLAQLTGSMIWATLILGGVFALIALIVYLVSVRPAVQYISDQLDNIAEMAQIVRSGYNWITDKLNSILCSVLESLLRKLMKNTTCIATFIGGLVLGAAITALVTPRTGQEVRESLRDLANKGIDKARNKYQEVTGKCSECDEMWAVKRYCWPLGWKMTADWLLLGVEAEKNRSVAFTGHQDYDGRADGILRAVVYRLWSEGFRFFLSGMACGFDLAAAEAVLALRGECAGMELVAVVPFAGQPESFSDADKRRYADVLTAADRTVVLADSYSRGCYYRRNDYLVDHAVRVVAWYIRRNSGTGYTVRRARHQGIEVLNLYEDKMNPTLFMEENNIKILGARVHNLQNVDLEIPRGKLVVITGLSGSGKSSLAFDTIYAEGQRRYMETLSTYARQFVGTMERPDVDKITGLSPVVAIEQKTTNKNPRSTVGTVTEISDFLRLLYARASRAYSPVTGEEMVHYTDEQIVELILKEFDGRKIAVTAPIVKGRKGHYRELFESLIKKGYLYARIDGEIREFTPGMKLDRYKIHTIDLVIDRMAVGDSLRERLLISLREAMRQGKGTMAVYDYETGKMRYYSRHLMCPTTGVAFEDPAPHTFSFNSPKGACPHCNGLGEEAVFDREKILPDPALSLRDGGVEPLGKYRNNMLFAILEMLGRRYDFTLDDPVGTISEEGMNAILYGDSEPLTINLAEFCSTGGNNLVSWEGVAEYIGRTEDEDSARSRKWREQFLVYKKCSVCGGTRLRDEALHFRIGGLNIAEVSAMSIARFSEWIADIEKYFSPKERKIAQEIVKEIRERLRFLVEVGLGYLSLARSSRSLSGGESQRIRLATQIGSRLVHVLYILDEPSIGLHQRDNERLIRSLKELRDAGNSVIVVEHDEDMMRAADYIVDVGPRAGRKGGRIVAAGSFDDILHADSITADYLTGCRRIEIPEKLRPGNGKSLIIRGARGNNLKNVDVEFPLGKLICVTGVSGSGKSTLVNETLRPILSKLLYRSYDQPLEYDSVEGTEHIDKLVVVDQSPIGRSPRSNPATYSNVFSDIRKLFESTPDAQIRGFKAGRFSFNVKGGRCEECRGAGVQTIEMNFLPDVYVTCKACGGHRYNRETLEVKYKGKNIDDVLNMTVNMAVEFFANIPSIHQKLKAIQDVGLGYLTLGQPCTTLSGGESQRIKLSSELSKRDTGRTLYILDEPTTGLHFEDIRQLLDVLAKLVDRGNTVIVIEHNLDVIKVADHLIDIGPEGGEEGGRIVATGTPAEVARCPESYTGRFLQKLGLMKKIFALALVAVFCLAGYGVSAQTQSKNQKLSPKQEKREAREQRRAQRQAEYERYIDSLVTSGNFQFIPNSMRVMPAGSEHLITNPNFGLQYWDGEFDIFLPYVKGAVMPYYLTVLNYTISNPEETLKEQSPNGWEVTFVTSLFSATRYVFTLDIYAKTGGATLTITNSWNITVQYSGTITSLMQDIINGRCGWCGTDELYVKYHDEEWGRLVTDERKLFEFLVLESAQAGLSWITILRKREGYRKAFCDFDPERVARMTGEDVERLMRFDGIVKNRLKIEATITNARLFLAVREEFGSFYDYTLSFFPDGKPITNSFRSLSEIPASSPQSDAMSRDMKKRGFKFFGTTICYAHLQAAGFIDDHLADCICRKGKMKYAIISTEKGDMKAELYEKETPVTVENFVNLAGKRFYDGLTFHRVIPDFVIQGGCPRGDGTGGPGYTIPCETSAGRQYHDRGVLSMAHRGKDTGGSQFFICMNRENTQHLDGVHTCFGRVIEGVDVIDDIRPGDLILSIRIVEEMQIRRRENDFYGKRAESPDLRHSPIPKHRPAAEFLLPTDPKMMKFRIGYGYDVHALGEGLPLILGGVEIEHAKGCIAHSDGDVVLHAISDALLGAAALGDIGLHFPDTSDEFKGADSKLLLARCVELLREKGYAVGNVDCTISMQRPKLRPHIDRMRETIARTIGIDTDAVSVKATTTERLGFEGREEGVSVAAVALIYREMVERPGSHEGLPVLFIRTFRIALTERADFFTDRRVARICCKNSHKTGFLPSRMQFDPIWGRVPFPKGVTPLDGSGLFSYFCRCRTADLMKDFVAIDFETANRERTSICSVGLVRVENGDIREKIYRLIRPYPDYYSSWNTRIHGLTYRDTAHAAPFPEVWADISPELAGLPLVAHNSPFDEGCLKAAFRQYGMAYPDYRFFCTCRASRRVFGRELPNHQLQTVAARCGFDLRDHHHALADAEACAWIARLILMAAGCLFAGYSKLPVSARTRIAFVLDFCRQEEQDRYKTLMSEITKLEPKLVWELFDAITRVPRPSKKEEKIREFLVDFAKKHNIDYQTDQTGNVVMRVPGTKGYENRPCVILQSHMDMVCEKNSDTAFDFDKDPIRTKIVDGWVKAEGTTLGADDGIGMAAALAALLDPALEHGPLEALFTVDEETGLTGAFGLGKGMLTGRYLVNLDSEDEGEIFIGCAGGVDTLAMFRYKTEAAPEGHVFFRVRVSDLSGGHSGDDIDKGRMNSNKLVARLLWNGAQRFGLRLSRFDGGNLRNAIPREAYAVFAVPSGSKAGFEAFYKEFAGELAAEAKFREPNFKIGIEEVPAASVIDAATQRNLLYALVGLPNGVIEMSLAMPGLVETSTNLASVKFEGDDRIVVTTSQRSSVESAKVYASQMIESVFALAGAEVSHSEGYPGWAPNPQSKLLEITVASYEKLFGVKPKVRAIHAGLECGLFLEKYPHLEMVSFGPTLRGVHSPDERLEIATVPKFWDLLADILKKVEMFDRFVRVFVLRLPSGEVQRRQKLGERSLAGYVIKIARRYRTGMDRLRKKIRKDNFGGSVSEPILNHKMNQYRYYVKLYENFIASANMSVFTPMIIMQESFVMLQTDRSLIWMWTIRADVVNFSKFAGKYICLCFEKSPYFRMLFSGCASRPADERPTIFVSILPLRGIVSEIVGDDFRVEVLVPPGMNPESFEPTPRQMIDLNRSQLIFNIGWIDFEQNMLSKIEDRRKVIDLHRGIEPIAGSCSHADAEKEHRHGVDPHIWTSPRELRTMADNAYRAIHELYPDSTVYAVNYQCLADKLQALDDSVAERLKQSGVPYFMIYHPALTYYARAYGIEQVAIEQDGKEPSAKRLARLIEQARRDSIRVVFYQSQFPASTVEVIAEDIGAQSVRIDPLAEDVVGNISYITDLITAERLMKTPLVSLRRVSVSYDGHDALKEVDLDIYPDDFLGIIGPNGGGKTTLVKAIVGTIPYRGTISYSPQLFRGKERLIGYMPQQSIFDRSFPISVLEVVMSGLQGQRGFHARYASGDRAKAQELLRTAGIDGIARKPIGEISGGQMQRALLCRAVISDPKLLILDEPANFVDNRFENELYRMLAELHGRMAIVMISHDLGTITSVVRNIVCVNRYVHRHDSNIITEEQLRNYDCPIQLISHGKVPHTVLALHPHDCCPHTRTEEMSTNDRDPAAGIAAQCAGNRYDNKQWRQANGRIYAGIHFVDPAQHFFRNEVLCLPDSERGGSEMANLRMLKKEIDYRLEELVFDCDMAICFQPTKEKEIFEVMQEGVALRNALFVKANNPADAHNPSLVRKHFAALRREIEASFGKLFEKLSEINKMNIEQFLTDKVAAAVSTLYGNAGAPLQIQKTRKEFEGDYTLVVFPLLKASRKSPEATATEIGEYLVANTPEIKAFNVIKGFLNLSLDSAFWAARFREVAANDTFGQAAPTGRTVMIEYSSPNTNKPLHLGHIRNNLLGYSVAQILKANGNKVIKVNLVNDRGIHICKSMLAWKLYGGGETPASSGMKGDHLVGKYYVEFDKHYKAQIKELVAAGQSEEEAKKNAPIMRQAQEWLRRWEAKDPEIYSLWETMNGWVYEGFDVTYKALGVDFDKVYYESQTYLLGKSLVEEGLARGIFFRKEDGSVWIDLTADGLDQKLLLRGDGTSVYMTQDLGTAFRRFEENRLDEMIYVVGNEQNYHFQVLKLILKKLGYDEWSGHIYHLSYGMVELPEGKMKSREGTVVDADDLIADMVSTAREMSDELGKLDGCTAQEADAIASMVGLGALKYFILKVDPKKTMLFDPRESIDFNGNTGPFIQYTHARIRSILRKAEEAGIDFRTQDEAAALLPEEIELIKALTEYPATVQAAAANFAPSIVGAYAYELAKSFNGYYHDHSILKEECTTTRDMRLRLAEQVARTIRLAMALLGIDVPERMMLRRAIPCPKTIRAGFVRRGRRPEPSGPAFGMDRLSFFYFFIAWKYSMEIFIILLLILLNGLFAMSEIALISARKSNLTAQAKQGNKRARQALKLAEDPNKFLSTVQIGITLIGILTGIYSGAAIADDLREVFVRWGVPYAAPVAQTLIVIVVTYLTIVFGELIPKRIGMTAAEPVAKLVAGPMKVLSVVASPFVWLLSKSIEGISRLFGLRDTDSPVTEAEIKSIVQEGAEDGAVQAVEQKIVGRVFSLGDRSVESIMTHRSDIAWLDVNMSVDEIRDLVRREPHGRYPVGEGSLDRLVGVVYLKDLFSHIGDPGFSLRQILSPVKLFHEGAEVYMALEQLRTEQLGYGIVCDEFGVTQGIVTLKDIFEALVGELLEDREEPDIVVREDGSVLVDGQCSFYDFLAHFGLEDVYSSAEYNTISGLILDELEHIPHSGEYLQWECFRLEVVDMDGARIDKVLATMIDTSDNKNKMKIADIELGDRPLFLAPMEDVTDPSFRYMCKQFGADVVYTEFISSDGLIRDAGKSLAKLRIAESERPVGIQLYGHLVEPMVEAARIAEAADPDIIDINFGCPVKKIAGRGAGSGMMRDVPLMVEMTRRIVEAVKKPVTVKTRLGWDEESKNIEEIALRLQDVGIAALTIHGRTRAQMYRGEADWTLIGKVKNNPAIRIPIIGNGDIDSGPKAREMFDRYGVDGVMIGRATYGRPWIFREVKHFLETGEVMPQPSVAERVEIAKEHLAKSLEIKGDRVGILEMRRHLSNYFKGLPNFKETRLKLVTLFDPNELYATLDSIADRWGDFDVSGVIPAPLSHDVMKEMNRQKMMALVAHDNMKHDLAEWVDWNCEKLSKHRIVCTGTTGKIVEETLLNHSASHHYEQPALDITRLKSGPLGGDQQLGALIADERISALIFFWDPMSAQPHDVDVKALLRLATLYNVPTAVNRSTADFLISSPLFEEEDYTPVVKDYTDYIQRSLKMKISIVGGGNMGGAIARGLSTCDLFRPQDITVINRRASKTAEIQEFNPELQAVTGDYSSLATAYIVVIAVKPWIVEALIKEHLTGKRPDGQIVISVAAGIFLEQLQTWAGKDRALYCAIPNTAIEVKQSMTFITGLNATEDQNRLVLNIFGALGKAELVEERLLGPATTLCSCGIAFAFRYIRAAMEGGVELGLYPQKAREGVLQTLRGAIALLESNGSHPEQEVDRVTTAGGITIKGLNEMEHAGFTSAVIRGLKASNNGMELKEILAISGQPGLYKYVAQSSRGVIVESLSDGKRMNAASNSKVSALTEISIFTEGEDIPLAEVFTKIYEHTQGQPAISHKEAPEKLKAYFAEVLPEYDRDRVHVSDMKKVFSWFNTLVGAGFTEFKLPAEQEAMKKWFLFLIFIACAIPSCELKEVGPEQTTFPVITDEGATIEDGGRVSSVQKVYVQANISNQYGAFYAQVKYDVKWTDKNGVEHTEQKSTNAYYFKATSDTVFYEAIIPAQKAGSTVYWLIVVTNENGLSSVTEAQQYSVYAIMGFLFITAQQTEKLIVPDSIQKAKFAETVEKIANMDLEKVLTNLVSESIWVGLKIVLALAIYMAGRWLIGRLIKLLSTAFEKRKVDRSLQIFLRNLIKTISYIVLILLIIQVMGINTTSIVALLASAGLAIGMALSGTLQNFAGGVMILLLKPYRIGDYISAQGQSGTVQEIMLFSTKITTADKQTIYIPNSSIATAIINNYSTSETRRVEWVIGISYGDDFATAREAILELLSKDARVLQDPAPAVYIAALADNSVNLTVRAWTKNEDYWDVFFAMNELYYKTLPEKGINFPFPQMDVHLTKEMCLTDFAMESKIEIIQINISGEDKPGMTSSLTDILARYDAFILDIGQANIHQSLTLGILFMTTSDKSGAILKELLFKASELGVMIRFTPITEEHYQAWVGRQGKNRYIITLLGRQVTARHIAGVTKAVAEQGLNIDAIKRLTGRMPLEEENRATRACIELSVRGTLGDKAVLQKRFMELSNEGVDISFQKDDIFRRSRRLICFDMDSTLIETEVIDELADRAGVGPEVRAVTESAMRGEIDFTESFTRRIALLRGLDVSVMEEIARNLPITEGLERLMTILKRVGYKTAILSGGFTYFGNYLKQKYGFDYVYANELEVEEGRLTGRHVGEIVDGRRKAELLRLLCQVENINIAQSIAVGDGANDLPMLDLAGLGIAFHAKPKVKATASQSISTIGLDGVLYFLGLKDSWIEMLRLSLLLFALLAAGCYDDAGVPAPKNDPLPEANLSLPDLSARCGDTPVRIVQDIVVAGRVTTSDEAGNFFRSVVLQEDGTGVELMAGLDDLFRVYPPGCRIAVRLQGLAMCRRFGVVQIGTMPAAGDYAVEAIGVRALLDRYVACETVDVLRPVPRIVAFDELAPDMCGCLVQIEDLTPLPSEEDPTDWKWEGYRLFEDRAGNRIATYTSTYARYAASEIPKGPVTLVGVLQYGNAGSIGKSYMIKMRDENDCFRMRTIVFGSLLLFVLQACGNASSPEYESGDGTARHVSIAYLKSLCRGVLHPVTEDLWIEGCVVGNDLYGEFPDALVVEDESGGIEVLIDAKRLYRTFDSGSTVRVYCNGLALGDYGGKVQLGLPPTAEYILDRISAESLGRHVRRIGDGSVDFVPRELSFGEVAASRIATYVRFRRVRFAHEEVGLPFCLRDSETGRLLATDRHLVDERNDTLIVRFAASCTYAEEPAPAGMGTVSGVLDYFNGNYMLRITNRLMEFPMPKLLLILRFYRSAMLFFCGAVSVALAWLVTGYGPSVVPLCLAGKMVIYPVYLYVWIIPRYNDEFDYYRNLGVRRRMLLGASCGIDLLACYMLLIFVSLVLYEPLMNPSEKHILEIDSVELSFGDRVILSSVYLAVETGGATALLGRNGSGKSCLMKILCGALRPGFRSMRIDGKWYDRFGSSQVRYLPQQGFTPGWLTVEAVLRDFGLEWDDLTVWFPIFGKLRKAKIRTLSGGERRILECFVILRSRSLFAVLDEPFSQVAPLHVVTLKALIRAEKRNKGILLTDHMYRHVTDVADRLYVLANGQTYLTQDAEDLVRYGYLNHLMKGFCFGRVQINLALLPACTIFAAVNSGSEKVVSRIAAAGRKFPHLKMAGSNFVDYVKIFARSGHGGSGSAHFRREKFVEFGGPDGGDGGRGGHIILRGDSQYWTLIHLKYQRHQFAEDGEGGSGARSSGKNGKDIVIPVPLGTVARRVLEDGTTEYAGEVTADGEELVLLKGGRGGLGNWHFKTSTNQAPRYAQPGEDRQEGTFILELKVLADVGLVGFPNAGKSTLLSVVSAAKPKIANYAFTTLEPNLGIVECRDHHSFVMADIPGIIEGAHEGKGLGTRFLRHIERNSVLLFMIPADSDDIRKDYAVLLGELTQYNPELLDKERLLAITKCDMLDEDLIEEMKSHLPEGVPSVFISSISGMNIPRLKDMLWEALQKMIIGIPKEIKNNENRVSLTPSGAKELTKRGHKVYVQATAGANSGFPDKDYVAAGAELLPTIEEVYAKAEMIIKVKEPIEPEYKLIRQGQLVFTYFHFASSEPLTRAMVESGAICCAYETVEASDRSLPLLIPMSEVAGRMATQEGCYFLEKPHGGKGKLLGGMPGVKPAKVFVIGAGVVGTAAARMAAGLGADVTICDISLKRLAYLTDVMPQNVKTLMSSEYNIREELKTADLVIGSVLIPGAKAPKLVTRDMLKDMEPGSVLVDVAIDQGGCFETSRPTTHEEPTYFVDGILHYCVANIPGAVPYTSTLGLTNATLPYAIQLADKGWRRACKENHELELGLNVVEGKVVYKQVADAWGLKYEPLALMERQVAACHIAGALAGIRCSARDTEVIGIKTGAISRTELKINRTQASDFFIIWVYLYHTMTQMRYLLFVVIGLIGCFPLRAQTPEDNLRDEEYYPFQNGYEEPYSPMIDTDSSLFYRAIQSTGDLFRDATDFKFSFVAYNRRGEPYRPDRMSLNGIRLPSRYIPSMNALYPQKYGEPMNGWHLPTTLDAEYRTSEEPLLPERNAALQFSGRNYLMGLRLTIAENLGRNWDLAATVQGRTGRDLYADGVFSNSLNAAILLSKRFGDRHLFSLLTVVPVSMRSLRTSSTREAFDLTGNPLYNPSWGYQDGKVRSGRIRREAVPLAAAAYRIRLTDATSLAATFTAETGIRRYSSLAWYDAPSPMPDYYRWMPGYQTDPVTRLEMENIWRANDVRYTQIDWDEFYRQNRNSKDGSATYLMEDRVERIANMQLLAEGITRISERLTVRYGIRAARTDSRFYKQMRDLMGRSYFVDRDYYLIDDGVYGNKLQNDLRHPDRIIREGDRFGYDYDLRRNEIGAGGSLEYRADRLRAFIAAEVGAASVFRRGHYEKELFAGNKSFGKSRALHFAPYLFRASAGYSFSVRHHLEMTVYASSRTPDGDDLFLNLEYNNRPVEDPTEEKRYGAELNYTWSGRNVRFRATLFVVRTADGMQVRHYYDDFYATYSDMAAAGIGTLRYGAEATALIRLAYRWNLTLAASAGRYRYADNPVVTVYADANNEVLDRNATSYMGDCSVGNTPQLTGFAGLNYYGPKGWGVQAEAAWTGNRFVEPSLVRRTSRIARQLAESPGAFELFTRQERLGDAFTLNVTLFKSFYFNASRLTLMLSVRNLLNDRDQLFSGYESPRVRRIRTADTYVYRPLDTRYLYAYPRTFYASISYKFMKEKLQQLMKSEGLTSSRMAEILGIQPSGISHILAGRNKPGFDLLQKILRRFPRVNPDWLLLDSEQMYRTGNPKSSSSTNGTDAGNGRTDTGLFGTELEQRSNTAGSVAPSTQTAENDNELSKQTDTVLQTLAGNDRNPVVRVILVYADRSFEALTLHKPMLLIFNKCKILSKPSQQSKIPCIIRIKILNYQYKYTINHIFMTTNMASIFTRIINGEIPSYKVAEDENFLAFLDINPLEKGHTLVVPKKEIDYIFDLDDETLQGMIVFAKRVAKKIQAKIACKRVAVVVFGLEVPHAHIHLIPMENEYDVDFRKVKPKFTPEEFEETARMIREMDKDIIQILWSALLIVIVTIVPLVKKFKEMQRKELRSASATRSVRQADADTSDPVSGFRKTAGKSPKTEKAESPLRNQIGISRADAEQQPHSPGIAEEFDVRKAVLYSEIMAPKFKEEMDFTPEDERLIKEKWEELLQSCTKICKNDEDWEFIKRAFFLAKEAHGGVRRRSGEPYLLHPIAVAKIVVDEIGLGVKSVVAALLHDVVEDTEYTVEDMERIFGPKIAKMVDGLTKMSGVFNADTSEQAEYFRKVLLTLSDDVRVILIKIADRLHNMRTLGSMPTNKQIKITGETLYLFAPLAYRLGLYAIKSELEDLCMKYRFPVQYAELSEKLKATEEQREAFISKFNAPIIEALKRDHINFEISGRVKSLYSIWSKMQRKQIPFEEVYDLFAIRIVFQPLPFPSEKTQCWQIFSTITDIYTPKPDRLRDWISMPKANGYEALHSTVMGPDGVWVEVQIRTQRMEEIAERGFAAHWKYKNASLSNNEDELDRWLKKIRDALNGPTENAVDFLDNFKLSLYTSEIAVFTPKGEARKMPYGATALDFAYDIHSKIGNSAIGAKINHKIEPITTQINSGDQIEIITADNARPKAEWLDIVTTTKAKQAIKSFLKRERQNNIERGMKMLEERMQQLNTPLSGRVLRKIVPIYESNNKEELYSKIGAGIVDLKDLDKVLKVNATSKILKFWTLFINKKEDEEGDDAENPEPNKAKAEESATASEPQFVMAECCKPIPGDSVVGYKDPASNRIIVHKSDCKELDRLAAQFGRNILKDEIKWSQHKAMSYLSTIELRGIDRTGILLDLAKTVSEDFSINIRQINIQTHDNIFEGTISLYVKDAEGLHAIMDKIRKIKGIDTVKRNQDMAEKTQANPDKLKVLNAVMEKIEKDFGKGSIMRMSSAEVADVQVIPTGSITLDMALGVGGYPKGRVIEIYGPESSGKTTLAIHAIAEAQKAGGIAAFIDAEHAFDSSYAQQLGVDVDNLLISQPDNGEQALEIADSLIRSSAIDIIVIDSVAALTPKAEIEGEMGDAKMGLQARLMSQALRKLTSSISKTKTVCIFINQLRDKIGVVYGNPETTTGGNALKFYASVRIDIRRVSVIKDGEEQLGTRTRVKVVKNKVAPPFKKAEFDIMFGEGISKIGEIIDLGVDYGIIKKSGSWFSYGDRKIGQGRDSVKELLKNDEALRNEVEAKVREAMIAARKAMHPDIEPHRRQSIRRPYPPPPKIPDSSGRRQRTTLFPQNTTHPDTQPQISPSPTELHPQTAINPAGNGDNCILFRNFEKMLAPAQTYCEKWQTCLDQIKSRTTEEEFVKWFKPIVPLEFDGKTLRLCVPNMSYVYQIEKHYIPFLRPIISQLYGQEIRLHYAVPKNDAQSVPVSKEADTTAISQFSTQTNTANIKNPFVIPGLKKIVIDPQLNPNYTFATFIEGECNRLARSAGMAVAVDPGHTPFNPLYIYGNSGLGKTHIVQSIGHEVRQRHPELQVLYVSMNKFQAQFQTAYKNGEIPDFIHFYQMIDVLIIDDIQELTGKTGTQNAFFNIFNHLQLAGKQLILTSDKPPVELKDIEQRLLTRFKWGLSTQLNTPDYDTKVKIIRIKAQKLGLQLTDEIVRYLADNISANVREIEGALSALVANTVYMGKKVSLSLVKEILKVYVRVCQKEITIEHIIEVVCDFLHIDIQRLNSPERTREVAQARQIAMYLAKQHTKSPLIAIGSAIGGRNHATVLHSCKAVSNQIETDKAFQRQMEELEKLVLAMENGLEQQVLAKAQKWLDGNYDAETKKQVKYLMDNDMKELVESFYKDLEFGTGGLRGVMGVGTNRMNIYTVGAATQGLSNYLKRNFAGEEIRVVVGHDSRNNSRMFAERVADIFASNGFTVFLFDALRPTPELSFAIRELKCQSGVVVTASHNPKEYNGYKAYWSDGSQVTAPHDKNIIDEVEKITEVDQVLTGRNPQNIHALGKDFDELYLNKIYELSLSSESVKRFHDMKIVYSPMHGAGVRLVPESLKRFGFTNVQMVPEQAVIDGNFPTVESPNPEERKTMSMAIDLAKKVKADLVLATDPDSDRIGVALPDENGEYVLLNGNQTLVLLMTYQLTRWAELGRLNGHQYVIKTIVTTEMVDAVADYFKVKCYECLTGFKYIAKIIRGHEGTDMQYIGGGEESFGYLAGDYVRDKDGVSACSLAAEAAAWVRDTMGISLYEWLKQLYVKYGFYQEGLVSVVRTGKEGAELIQRMMVDYRANPPKEILGSLVVKINDIQTLESFDVRTGKKTHLEQDKSNVLQWYTEDGTRVCVRPSGTEPKIKFYFGVKATLPSVADYEKVRAELNDKIERIKKELKLVMKYDFDEIIPRRGTNSVKWDLATDERVLPMWVADMDFRAAPPVLDALERRLRHGVFGYTKVPDAYFEAVKGWFGKRHGFRIENEWILPTTGVIPALSVILKALTEPGDKVILQTPVYNCFFAVLERTGRQPLANPLINENGAYRMDFEDLERKAADPQAKLIFLCNPHNPAGRAWTAEELTRLGEICLRHGVTVISDEIHCDLTLDGHRHIPFASLNEEFLRHSVTCTAPSKTFNIAGLQAANIIAADPEIRRKIDRQLVDNELHALNAFAVEALIAAYNEGGEWLDELKKYLWENYEYLRDFFTRHLPALPVTPLEATYLVWVDCRTLKRPTTEIARQLLEEGHVWINEGEMYAGEGFLRINIACPRKTLAEGLERIRKVVGMNKRPSDDGWNIEKHNNCLIGIPGDYVPESFRQVMYDGSHYRQNTALPTNHLPANRPIKAGSDTKSPMELSELQKRVDTWIREYGVRYFSELTNMAILTEEVGELARVMARKYGDQSFKAGEKENLADEMADVLWVLVCLANQTGVNLTEALEANFAKKTARDKERHRNNPKLMDALERYIHDFSSPEEELLHELDRQTHLRVVQPRMLSGHIQGKLLELLVRMLRPRNILEIGTFTGYSALCMAAGLEEDGVLDTVEVDDELEEFAASFFRRSPHGQKIRQHIGSALDIVPTLGYTFDLVFIDGDKREYPDYYRMLMGDGGSKVLVHSGSILIADNILWSGKIVEPVAHNDRHTQALLEFNRMIREDERVENVIVPIRDGLNLIRVKMEFTTYTLPNGIRGIHRRIKGNVTHCALLVNAGSRDELKNQFGLAHFTEHALFKGTEHRKAYQVNCRLENLGGELNAFTTKEDTTIHATTLRSDFSKAVELIADVAFHSTFPDRELEKEKEIIYDEINTYKDSPADMIYDTFEEMLFAGSELGHNILGRKSSLARFSGESIREFVARTHTTDQMVFSSIGNLSAKSVETTVARYLNDIKSSARDFSRRQPAAVEPFSRIVTKHTHQTHCIIGARAQGINDAERLPLALLVNLLGGPSANSLLNVLVREKNGLSYNIEASYTPYSDSGIVAIYFSCDHDNTDHCIELIEGELGRLQTTPLSARRLSMAKKQFIAQLAISMESNEGYMLGAGKSFLAHREVDTMEEVYRKIQALTAEDLTAVASSVFSSPSRLIYKMTKEQKSIYIKGARVHNLKNIEVEIPHNRLVVITGLSGSGKSTLAFDTIFAEGQRRYVESLSAYARQFLGKINKPDVDVITGIAPAIAIEQKVNTRNPRSTVGTTTELYDYLKLLYARIGHTFSPVSGQEVKCYTEDDVAQYILSLPEGSRVAVAAPLQLREGQGVIEKLTLVLGEGILRVHAAGETLPIEDFLPRVDENTRAEDISIVVDRAKVSQDGDLPTRLRDSVARAFSYGNGVCRIVTPEGVKEFSARFEADGIEFEPPTEHLFSFNNPLGACPTCEGYGKIIGIDEDLVIPDKRKTIYEDAVACWRGETMRAWKDQLVANAYKFDFPIHTPFYQLTAEQKRLLWCGNEYFHGLNDFFAYIDSERRKIQFRVMKARYTGKTVCPDCGGSRLRKEALYVKIGGKTIADLVVMPVETLADFFASLELDAHDTKTAARILTEIRNRLQYLMDVGLGYLTLDRLSSTLSGGESQRINLSTSLGSNLVGSLYILDEPSIGLHPRDTNRLVGVLEQLRDIGNTVIVVEHEEEVIRAADWIVDIGPEAGYNGGEVVFSGPLKALLKEKKSLTADYLTGRCKIAVPTSRRSPAAWITVKGARQNNLKNIDVRIPLGVMTCITGVSGSGKSSLAKGILYPALRRLLFDTGLKPGDFDAIEGDLSTLRSVEMVDQNPIGKSSRSNPVTYIKAYDEIRKLYADQPYAQRSGFNPSHFSFNIAGGRCEECQGEGFIKVGMQFMADMELVCEACGGKRFKDEILEVRYREKSIYDILEMTVDDAIAFFGEEKKNATCKRIIERLRPLQEVGLGYIRLGQSSSTLSGGESQRVKLASFLSKESTEGNVMFIFDEPTTGLHFHDINKLLDAFNALIARGHTIVIVEHNMDVIKCADWVVDLGPEAGDRGGSIVFEGTPDGLAGCKESYTGRYLALREKNEMTSDSYHTLAGPAEAIYKEKSSKFLAYAYPVESEEEIRTLLDALRKKYYDATHHCYAWRLGPHGETFRANDDGEPSGTAGKPILGQLLSNELVNCLIVVVRYFGGTKLGVSGLIGAYKESAAEAIRAAEIVERTVDTVVEVEFSYLAMNDVMRVVKEEQPRVLTQQFDNLCRMTLAIRQSLAGGMIGKLEKIGGVTLEMKMGKIKAFFRNKWVGFTLASILYILWFVLWTGNWWLLLGEIVIFDLYITRYFYKYVWRHNAEMCKKSKSYKAVYEWVNAIIFATVVASLVHIFFFQMYVIPSSSMEKSLLVGDYLYVSKVAYGPQMPNTPVAFPFVHHTMPFSKTKKSFSESVKWPYHRLKGLGRIERNDVVVFNFPAGDTVLLERQDVSYYDVLRQYQQTFGHQAGRERLMQEYTVITRPVDKRENYIKRCIGLPGDSIRIEETAVYVNGKPQEPVAGKQFMYLVETTSPITQYALDNLGITEWSNKGTLYYMALTDENAAELEKLDNVASVQKYIARSPNFDVFPQDRRYAWNQDNYGPIWIPQAGTAVALTADNLPLYRRIIETYEGNDLRVDEEGKIFINGEQTDTYTFRMNYYWMMGDNRHNSADSRFWGFVPEDHIVGKASFIWLSLDPEKSFPANIRWNRMFTKVKMKAAIIGHGKMGREIEKILLERGHRIGAVIDEANASELDAAHLAGIDVALEFTTPDAAYGNIRACIDAGIPVVSGTTGWTNRLEELRSYCREKGGALFYASNYCLGVNLMFRLNRRLARMMERFDAYDVRIEEIHHTQKKDAPSGTAITLAEGIISEIGRKTGWVNEPSDDLSQIVVTSLREGAVPGTHTVTYESDDDRIELKHTIKNRRTLALGAVVAAEFLCGKKGVYTMDDLLKMANNQKMRTESDLLGSVELPADVLYGVQTLRGIENFRISKFHLNEYPLFIKGLAITKLGAAEANHKLGLLTDEKFNAIAQACREIMDGKHHDAFPVDMIQGGAGTTTNMNANEVIANRALEIMGHQYGEYQYCSPNDDVNCAQSTNDAYPTAIHLGMYATHLKLVEHLKQLIESFEKKAAEFADVLKMGRTQLEDAVPMTLGQTFHGFASILRDEIVHLNEAAEDFLTINMGATAIGTGICAEPGYAELCTENIARITGWKIRLTGDLVGATSDTSCLVGYASAMKRVAVKMNKICNDLRLLASGPRCGLAEFNLPARQPGSSIMPGKVNPVIPEVMNQIAYKVIGNELCVTMSGEAAQMELNAMEPVMAQCDFESAELLMNGFDTLRTLCVDGITANRERCADYVKNSIGVVTALNPIIGYKNSTKIAKEALATGRGVYDLVLEHGILSKEELDTILKPENMIRPVKLNIKPRKMRLGKLGTSARFLSAFTIFAEDGRRFGNLCVQARTIALTFHYLCRVSWVRILFANGDPISRDSRLGIERFGTSRLGFLPKCGDCLQDVINGKTMRYFIELRYNGGAYCGWQRQPDMPSVQQTIEGAISTLLREPILLTGAGRTDTGVNASYYVAHFDTSSPVADPEQVVFKLNHMLPGDIAVSRIVPVAADAHARFSAREREYRYYIEPRKNPFTRAASWQYYVPLDVAAMNRAADVLMEFEDFTSFAKLNSDNKTNICHLKRADWTVGRDGTLCFTIRADRFLRNMVRAIVGTLVDVGRGRYTVEQFRDIVASRDLSRSSAGAPAQGLFLSDVLYPPEVFVRETRLPALRYFSSVEKMKYDIIVIGSGPGGYVAAIRAAQLGKKVAVVERAEAGGVCLNWGCIPTKALLKSAQVYNYCKSAEHYGLDFAGEVRPNLEKIVARSRGVAETMNKGVLFLLKKNNVELINGFAKLKGNGRIDVDGTEYEADHIILATGARPREMPFMPIDGEHVISSKQALVLPKLPETMIVVGSGAIGSEFAYFYAALGVKVTIVEYLPQIMPLEDEEVAKTMERSFRKLKATILTSTTVKSVKVNAEGKCDVEVEGKKGTETLVADIVLSAVGIKSNIEGIGLEELGIKTERDKVIVDKQYRTNVPGIYAIGDIVPGPALAHVASAEALCCVNAICGLHSEPVDYTTIPSCVFTSPEVASVGMTERQVKEMGIDYKVGRFPFTASGKATAAGDRDGFVKLIFDQNDKLLGAHLVGANVTEMLAEPTLAKSLGATVQQIAHTIHAHPTMNEGVMEAAEVALGAAIHVMKKLFRTLFAAALCCLTFKATDACTNFIITRGASSDGSVMVSYAADSHQLYGALYKTFAGRYKPGTMLPVYDWDSGRYLGEIPQAAQTYATIGNMNEHSLIIAESTYGGREELADSTGRIDYGSLIYITLQRAKTAREAIRIIVDLANTYGYASSGESFSIADRNEAWIMELIGKGCELDAEGNNTRKGIVWVARRIPDGYVSAHANQSRITTFPLDDPENCLYAPDVISFAREKGYFNGPDEEFSFCDAYAPADFGTVRGCDARVWAFFRTVADDMDQYTDYAMGYNMSNRMPLWVKPRTKVDPKTVFDAMRDHYEGTPMDMTQDIGAGGHALPYRWRPMDFEVDGVTYLNERAVATQQTGFWFVAQARPWLPDDMGILWFGVDDAATSCLTPIYCSATEVPECFREGNGTMLKYSPTSAFWLFNRVTNFAYLRYDLIAADIRKVVDEWENTRLEEVKQIDAATEGDSPKKRQKRLTRYSVDMAQQLFDRWTELDRYLLVKYIDGNLKSETEPGKFLDNGNGRDIPDKIQFPGYNEKWKRAVVADHGEVLKVIQMRREHLCRMLSGRFVRFGCDGMFFDGRRERLSAVFLPGADSGSRLALRGRKGHYSPKNLNMCYRSSSIPFILLALSLLAVSCGSRSGHTGQMPPMEIETAVAESDSLYTRRSFISQINSDNEVVVEPRVSGFLVARHYKKGMPVRKGQLIFEIDDSEYYTALLSAQAALESSRALALEAKNNFDRAVPLAKINAISGTQLDQYTAQYAASEADVKSARQALRNAQLNLGYTKIYAQIDGIIESSNGSVGDYVGPGTQIPTLTTIMNIDTVQVPIAIPMTQFLRLDSNRTNIYDNAELLSEIVLYEADGTRYPLFGKYDYTRTAVSSATGTIVLIVRFPNPSYRLKTGQFARVEANIGAKLPRVLVPQQSVVQTLDVSSVWVIRPDSTAEYRKVTPGETFGGMWAIESGLEPGETVAVTGLQKLRQGMRVVPVKKMGKFFIARPIFAIALAAAIVLLGIISIFDLPIEQYPDITPPVVEVSTTYPGADAETVNNAVATPVSQSIMGVSDMLYMQATSANDGSMNLQVTFDIGSDPNMDAIFTQNNVSTALSQLPASVTQQGVTTRKTMTGFLIVYSLTSDGRYTGDFLSNYAYINIQNELLKIDGVGKVDIMGAGEYAMRIWLKPDLLDYYKISLDEVFAAVEAQGGIFPAGKFGGEPAAGDVTYTYTVTMPPQIYDAEQFGDIIISTTPEGEQVRLSDIADVALGSRQYGVESLFNSDPTALLVIYQQPGSNAVDVGNSVKAEMERLSKRFPDGITYTSMVDATTSIEAGVKDIFVTLIIALILVIAIIFLFLQDWRATLIPLLAIPVSIIGAFALFPLLGFSINIISLLGMVLAIGLVVDDAIVVVEAVQVNIEKGLSAKQATVEAMHSVSSPIVATTVVLLAVFIPVSFMGSITGLLFQQFSISIAVSVCISSFNALTLSPALCALLLKPRPKVQKGFFAAFNRWFGKRTEEYTSATTRFIGHLKRTGGIVAVTLAAIAVIWHFLPSGFLPDEDQGYVMVFVQTPEASSLQTTVKAMQRVDELVRQRPDVEATSFAAGFNMLAGIASSNSGIIFVKLVDYSQRSKTSSQIASALTEELYVAVPEAVSYAFISPSIPGLGVTSGITLQVQDLEGRGTEFLADETMRFMDSLRKQPQIGSVTTQFNAGIPQRRIEVDKEKALAQGVPLRSFYKTMSTLLGGSYINNFNRFGKLYQTYIQAAPEYRRDKYSLESYFVDDGQGNSIPVSSFTTVRDTTGVEFVSQFNLYRSIELTVNPAAKVSTGQAMDAIEAVAADVLPEAVGTTWSGLSYQEKTASGSSGAVYLLAIVFVFLTLSALYNSWGLPLAILLSVPLAVLGALLFVGAAYLVSPEFINNIYMQISLVMLIGLSAKNAILVVEYADQLFFEKNMDLKAATIEAARLRMRPIMMTAFSFILGVMPLIFASGVYATARNIMGMALVGGMLLATMLGIFIYPALYYLVARVGKFEHKRELKQKESMKRYFAIILFAAALASCTPKLYDAQVEVPENYRFAGDFPQDSVSLPFAWWEIFGDSTLNRLVEHALENNRNLAQAASRIFEARANIAVARAPFLPSVGLNLSAQGNYTEPTGTTQQYTIEPSISWEVPLFGTLRSANRAAKAALYSSEWGYRGVMLSLTAEVATSYFTVLQYTRDLRIARQSYVLRRESAALVDSLARYGMSNGVALQQAMSLVYQAEADIPQYQRAVEQSRLALCVLLGENPSYFGDETFDDALLDNYQVMDIPVGLPSELLERRPDIMEASFNMDEAAANVGLARSKRFPSITLTGAGGIVSSSIEGISDGHSWAWSAVGSLVQPIFNFGKLKRQEQVARERYYQSVFAYEETVLEALGDVEKSLLDIATYRSQAENYARLLRANIEIATMTNSLYRNGMSAYLDVIDAERNMYQSQMEYVNLVAQQYINYVNLFKALGGGWMKFAILKKKEEVKICFDSSFFYRQTYSTERDNRSSGRMELPFAESWKIKMVEPIRKSTRQEREKWIKEAHYNLFQLKADQVYIDCLTDSGTGAMSDRQWAAMMMGDESYAGSSSFFLLKDTITRLTGFEYVIPTHQGRAAENVLFSHLVHNGDIVPGNSHFDTTKGHIESRKAVALDCTVDEAKDTQLEVPFKGNVDPAKLETALKQYKDKIPFIIVTVTNNTAGGQPVSMQNLREVRALADKYGKRVIFDSARFVENAYFIKTREDGYADKTIKEIVKEMFSLADGMTMSSKKDGLVNMGGFIATRHEDWYEGAKKFCIPFEGYLTYGGMNGRDMAALAVGLEENTEFDNIETRIKQVQYLAARLDEYGIPYQRPVGGHALFVDADKVLSSVPKEEFPAQTLAIELYLEAGIRGCEIGYILADRDPVTRENRFGGLDLLRLCIARRVYTNNHMDVIAAALKNVYDRRDEIKRGVKIVWETELMRHFTVKLERLMSIADRILRVKSSLPGQVELVAVSKTYPAQRIMEAYEAGQRIFGENRPQEMAQKYEELPKDIEWHLIGHLQTNKVKMVVPFVAMIHSLDSVRLAEAIQKAAAAAGRTIDVLLEIHVADEESKSGWEWAELQEYVRSGAFARLPNLRVRGVMGVATNTGDEQVIRRDFAALQRYKSELSPYFGPEFDTLSIGMSHDYRIALEYGATLVRIGSLIFGARDYSKMSGTPRDQSAWVLEEFPDRPNAVRWTYQITDKDYKEAVRQTLERMKNRHIIASALLLLTTTAAAQDRHTETAPDTGENLQTAPNAEQLRQQIETLQRQLDLLEKGQDTLAAKKPALLSDPVEPIANMNGIIPLDTLQTINEAVKIVIYNDNSWKYVRDREFVKDSSIYTKYWDTSTLFPYKEYPLSEMPASLAIDLVDSLKCYHYPYKGSIRSKYGIRYRRRHQGVDIPVKTGDPIYATFDGRVRISEYNRGGYGNLIIVRHDNGLETYYGHLSERLVQSGEWVEAGQIIGLGGSTGRSTGPHLHFETRYYGQAFDPERLIDFESGILRRQTFLLKKSFFDIRSNAGQDFDDEAEVEKADKKEAAERAAVTYHTIKSGDTLGALARRYGTTVSKLCSLNGIKSTTILRLGRKLRVRMIEIDDKIVSTDLLRECFACDLGACKGICCVEGNAGAPLETDEVDTLEEEYPNYKPYMTPEGIRAVEAQGFMVVDEDGDYTTPLVDDAECAYAYTEEGITFCAIEKAFREGKTTFRKPISCHLYPIRLMNFSNGTVGLNYHRWSVCEPARQCGKRLGIPVYKALREPIIRRFGEEFYKALETAEQLLKNQMKRLNIALMAGGDSSEREIALQSAAQIASALDPAKYDITLIDLHGRDWHYTSPDGRQWQVDKNDFSITIDGEHKAFDYALILIHGTPGENGRLQGYLDMMGIPYSSCSMTSSVVTFDKITTKRTVAEFGIPLARGFFFGRDSRIDPKEIVRTLGLPVFVKPNASGSSFGVTKVKSEADILPAVAEAFTESDEILIEECIQGREMGCGMLIAKGREYIFPITEIVSKKEFFDYEAKYTAGCSDEITPADIAPEIKAELNRLTALAYKACRCRGVVRVDFIVTPEGKPYLIEINSIPGMSGGSIVPKQVREAGMTLGELYDLIIEDTYDRDRRMLYFGSFNPIHKGHIALAEYAIEKGLCDEVVLVVSPQNPLKPAGQQAPELDRFSMAETACAASKYPDKIKPSVIEFMLDKPSYTIHTLRHLTENYGTQMRFSILMGDDLVPQLPEWKQYREIIDNYPIFVYPRTGQPLPDLGGRITLLEDAPLYPYSSSEIRERLGRGEDVGNMLPEGVMRYIREKDLWSPASYIASLTARLEATPDDASLYVERGQWHYRRNEWGEALNDFNRALQIDPDHREARQFVEMTYEILSFRHTDIYNPMGKLVIFSAPSGSGKTTIVRELLQRFPRLEFSVSATSRAPRGKERNGVDYFFLSPEEFRQAVQEDKFVEWEEVYSGTCYGTLRSEMERIWQKGNVIVFDVDVIGGLNLKRIFGDRACAIFIMPPSIETLRERLVKRGTDSPETIECRVAKAEFELTKAPEFDHVVVNDDLAQAIEEATRILSDFLARMTGFGKAEVAIPDKKITVEIRTLNSKQLDLAVKLPSAYRPLEYEIRALAAKALQRGKADLYISVESTARQTRACIDEELFHLYYNQLLKICREQPEIGTPGSAENNALIQSILRLPDVVSSQEESVSEQEHAAVLDAVGQALAHLDEFRTQEGAILIADLLKRIDRIEAYKQEVIPFEKARTEAIRARIRESLAQLQAEVDNNRLEQEMIFYIEKLDITEEKVRLTNHCNYFREVAASEECAGRKLGFIAQEMGREINTMGSKANNSEIQILVVKMKDELEKIKEQVLNILMKKHNFNAGPCVLPREAVESAIEAIRDFDNTGIGLLEISHRTPGWERIMAETEQLWRDLLNIPDDYAVMFLGGGASTQFFEVPANLLKKKAAYLQTGVWAKKAAKEAKFYGEVEIVASSEDKNYTYIPKGYKIPTDADYFHITTNNTIYGTEIHEDIDSPITLVADMSSDIMSRPVDVKKYGMIYGGAQKNVGPAGVTFVIIRKDLIGSSERPLQTMVNYATHYPEEARNHSMFNTPPVLPIFVMHETLKWVKAQGGVEAMYKINKKKAETLYNEIDRNSMFVGTAVKEDRSMMNVCFVMAPGHEDLEAEFMAFAKEKGMVGIKGHRSVGGFRASIYNACPQESVDALVACMQEFEKNHKKMAQFFTFTPKRKEDGAIDFYTLMDVFDERKEDGTTSPAGHGERKIKFNDMKVLIATEKPFAKKAVDGIKKIITDAGYEVALLEKYTDKAQLLAAVADANALIIRSDKVTAEVIEAAKNLKIVVRAGAGYDNVDLAAATAKGIVVMNTPGQNSNAVAELALGMMVFMARNQFTPGTGSELKGKTLAIHAYGNVGKLVGRKGKALGMNVIAFDPFITDAKVFEADGVKKVDSIEELYAQADYLSLHIPATEQTKKSIGHKLMTSMPKGATLVNTARKEVIDEAGVIQAMTEREDLKYITDIAPEAAAEMSEKFGKRFFATPKKMGAETAEANINAGLAAANQIVDFFKTGNTRFQVNKMVKIKPFAGIRPPKELAAEVSSRPYDVLNSQEAKAEATERSLLHIIKPEIDFDPIADEHDEKVYKKAVENFKKWRDNKWLVQDGEEHYYIYAQTMNGRTQYGLAMCCYYEDYWSGKIKKHELTRIEKEEDRMKHVELQQANLEPVFFAYPDNDEINKIVADYVKNNKADYDFTAAPEGFGHHFWVIRDKKINDRITEIFAGIPALYVADGHHRTAAAARVGKKRQESNPNHTGNEEYCYFLAVTFPASQLRIIDYNRVVKDLNGMTTEQFLKALEKNFTVEPKGKEIYHPSKLHNFSLYLDGQWYSLTAKPGTYDDNDPIGVLDVTVLSNLVLDQLLDIKDLRTSKRIDFVGGIRGLEELKKRVDSGEMKAAFALYPVSMQQLIDIADTGNIMPPKTTWFEPKLRSGVVIHTFEEKMKDNKFFSFFEPVLKYIDTGKFFREPFRWLYAILAILNLLTPIVLLVMAINNDLFRYGGGRMIAAFILVWLVIAFVSWLGFQIWWNRREKVYAAATAHDDFVAIPVFSHFIQTFGEWAGMFVGIGGALLTLIAAIFLNGDASMLRMMGTGAFFGSGSLIYIVLNPIYGFIIVVVTRAAAETFRALAAIANNTKKSMAKIKGTILVDKERCKGCGVCVASCPCDVLHLSAEVNSKGYPVAQMANPDACTGCASCAIICPDSCITVYRQKFEMAEKEVKLMKGNEVIAHAAIRYGCDGYFGYPITPQSEVMETLMEEKPWETTGMVVLQAESEVSSINMVYGGASTGKRVMTSSSSPGVSLMSEGLSYLAGAELPCVVVNCQRGGPGLGTIQPSQGDYFQACKGGAHGDFHLIVLAPNSVQEMHDFVGLAFDLAFKYRNPAMILADGAIGQMMEKVVLAPQRPRKTDAEIAEECKDWATCGKGARKDRNIITSLELKSEVMEKINQRLQAKYKAMEENEVRYEAIDCDDADYVIVAFGSSARICSATVEMARAEGIKVGLLRPITLYPFPTKAIADLAKRGVKGFLSAELNAGQMVQDVKLAVNGAAPVEHYGRQGGMMFSPDEVLVALKEKLINKKMAEVVEIKQENLVYAKPKLITENVMHYCPGCSHGTIHKLVAEVIDEMGMEGKTIAVSPVGCSVFAYNYIDVDWIQAAHGRACAVATAAKRLHPDSLVFTYQGDGDMSAIGTGETIHAAARGENIVAIYINNAIYGMTGGQMAPTTLLGMKTATTPYGRDPRLNGYPYKIAEMMAHLDGVTYITRQSVYNPAHVRQTKKAIRKAFENAMAGNGFSLVEVVSTCNSGWKMSPVAANKWLEENMLPFYQLGDIKDLTKKMKETLIIAGFGGQGVLSMGKILAYSGVMQDYEVTWMPSYGPEMRGGTANVTVILSDKRISSPIAHEFDTAIVLNQQSMDKFESMVRPGGTLIYDTNGITRHPSRTDINIYTIDATAESARLGQAKLFNTMILGGYLKVCPVVKLENVMIGLKKSLPERAWKMLPENEKAINHGAEIIRKVRMETVKQLNKQEFTTKVADIEKSKGEWKFLGERPAVIDFFATWCGPCKALAPVLDELAADYQYKDRIDFYKVDIDREQELAAVFGVRSVPTLLFIPLSGMPQMMTGGRPKSDLKRIIDEVLMGKMKEFIKHNPATLDNVETMANAMIESMRFVDNTLDYPEAEKARPNDGVEPEWFYDAYYGAIPTSELTAIIQYTQQRMLFENIGETFLGIAFVEMKHFDRLGDFIGQLGGRVNTPKYSSSAVTVEYESAAEAIRVNIQAEKDTIAAYQQLIERIRKNNPEKLTQSATVAIQLLNKIVSDERVHVRILSELAQSVAAEEGKEAMKRLIFIIASILLGQTVCAQDIIQKKDATEIQAKVLKITDTEIEYQRWDNPDGPIYTIPAEDVFTITYQNGSKEVISHFDSSRRSAADKQQFGKLPRYQGEVAFAYGSAVSEGMQDLFPRIVFETVHGVRINPYLFAGVGLGINYFYKDIYFSNGWNIYELGNSGTVLPVFANVKGYLPVSSKAALNLSWDLGAAIGVGGYFNEGTEFYTSIGPGVTFGRQSGGVRGDFSIRFQHMGEGLNAILFRIGIGFMVLCSDYKYSKPIEHYAIFTAYFYLSFRFIHCFVAGRSTGNSMLRLKILFGFPRYSDCRMSARHERNGWQNREWNRRTAGSEFPDSNISTKMNAKDLRIVFMGTPEFAVPSLRALVRSGYNVVGVVTTPDKPAGRGQKLHESDVKIAARELGLPILQPEKLRDPAFVSAMEELRPDLGIVIAFRMLPEVVWAMPRLGTFNLHASLLPQYRGAAPINWAIINGESKTGVTTFLLNHEIDKGAILGQVEMPIQPEDNVGTLYDRLMTVGADLVVQTVERIAAGEITPVVQSDEDTSLRPAPKIFKNDCLIDWTQSGKRIIDFIRGLSPYPAAWTRLLREEQEANSAKIFEARFEAGGPEAPCGTIDTDNRKYLRIRCADGWIDVLSLQLSGKKRMAAQELLLGFRDANSYVCRMKNEKVLNTIEEAIEDFRQGKIVIVVDDEDRENEGDFIIAAEKVTPEIVNFMLKNGRGVLCAPLSEERCAQLELNMMEPNNTSLLGTPFTVTVDLLGEGCTTGVSIHDRAATLRALADPKTKPSDLGRPGHINPLRARQKGVLRRPGHTEAAVDLARLAGLQPAGALIEIMNEDGSMARLPQLLEVAEKYGLKIISIADLIAYRLRNESIVERGETAEMPTEYGMFKITVFRQKSNGLEHMVLTKGEWTEDEPVLLRVHSSCATGDILGSCRCDCGAQLHEAMRMIEKEGKGAIVYLSQEGRGIGLFNKIAAYKLQDEGLDTVDANVRLGFGVDERDYGVGASIIREMGIKHMRLMTNNPLKRVGLEGYGLKIDEIVPIVIAPNKYNERYLETKQERMHHKLNLCKHMKTIYKLVLKSYLGPMVLTFFIIMFVLMMNVLWRYIDELVGKGLDPGTIIELLCYATINMIPMALPLATLLAAIMTMGNLGENYELLAMKSAGMSLPKIMRPLLVVVSILAVGSFFIANNLVPYANKKFFRTIYDIRQMNQTLEFQDGLFFNGIDGMSIRVGHQNQETGLLTDVLIYDNRNASGNMTTTVADSGYIRLSDDKRFLEITLFNGERYEQTRNSSQWYNKSSLQRNKFELQKANISISGFEMQRTDADLFNNAQTKNISELQYEIDTLTQQVNSATTRSYDPLLKERIFVRDTTVITDRNDSVVVEKRDFRPMDALDSLATLDLRSKDRIWSQAVSAARNSRSMFSFDESQAKNALNQLYRSKVEWHKKLALPVTIIIFFLIGAPLGAIVRRGGLGMPIVISVIFFVIYYIISSSGEKMAKEGTWEAFYGTWLSAFVLAPVAIYLTYKATNDSGLLDVDWYVVKFKKIKEKISGIFARFAHKNKKMQTNDYRTMEFFNDLVRYSYLNHAFWACILSGITCGIIGTYVVCRRLVFLSGGITHSSFGGLGIAFYLGINPILGAMVFAVLSALGIEWANDRGRIREDSAIGIIWSVGMAIGVLFMSLRPGYTSGDLSNFLFGSIVTVTRTDVQALAVLTLVVTVGTLLWLRPVMYVAFDRDFARSQGIPTRLISYVMSALIAVTIVLSIRIMGIVLLISLLTIPVTIVNTFTKSFRTLAPAAAAVAVAGNLAGLALSYNFEVSPGAAIIFTLTVTLILVKLLTLLVKKRRRADENHLMTHRIFDFLISFTKKHTNSGVCTACLPTDTALCGNKARAPQIGRNKIRMLRYKTAPGSIFLMPATETIADAEALFERGPVRYFEGEKTVKVDLNDLAGDTEYNLYVAVRNINPLVYSDLASEVIDTHVPYTEMITLESVGLTSFSYHIMKPEGVTKYKHVCLSKSDYDYIVSLIGGSLHSYVSAFGAEATEDQTYNFDTTFFDIVDFRQDIYSDMEFIIIAGEVDENGQVAESAVKSLLFKTKKAGVAPYDFEVSVGNIGSMTADIAIDPDEGIERFRYRVAKRAEFDFVAFEGEASVRRMIIGHWDDLTNESTKAITVNATGLKPNTEYQVGIVGFDKELREKVLLYDFTTGEPTGPKPTLAVETQTVETPWNKAAFKVNATYAVAMTAGVFPKGSIDEVLGRPGNENLTAGDVIYNNGTQLTEQEVAAAMSEEGLVIESGELLPNTEYEFGVYAANAEGVGVSEIVEFTTLLPPQQGGELRAKLPGKYTATTKDSNGDPVTFSVTIATGVNEATEKAYSDLNRLVVLGFAPCGVDYASPEELLANGWAATEEEANANYGPKWFIEFTSDETISTSLPVNNELDYTMLNFDGKQYYFHAFAKRPTSDRYTDAVRSFPVEVSDDLTVTIKKLVEETDYGTFTYYPGVLSGTSQWWGDMVFAASEEIVLKRDADQGPEPAAVKSVRHLSMPERVTVNLGASPAVDNRRAVAERLMRMKNLFGWMLVVLLVLTAGVSCSDDEELLAGNGIADAAWSAENQVEIEGGVLNYTFAAASDWTARSSADWCEVQTGSGMAGESLLRLKVAKNTRAEARSATITVSVWGYASPVSFVVKQGKGLIEQGDGKYRSVNEWVAEYMKSRYLWNRAIENVSLDYSLCYDFFFFSILDGVAAQDEVNREDGHWQGQKRMYYYSRLESDAPLSRTPGEAYVGSGIYLLDATRLGDDYIGIVVMVVIPGTPAAEAGLVRGDFITAVNGEEVTESNYQSLGRAVYDGAVDVTVNSVTWTDNGTTPVLTPKGNVQLGSATFTSPAIYMDKVVEIEESDKKAGYLLYMGFDVDYDEELIAAFDRFRAQNVTDLILDLRYNNGGDVLSSTVLGTLIAGEAYKGQLYAHMTFNEDRTEAGESGDYKIGVKETFESVYEPIERALQHALGLKKIYVLVSETTASASEMVINGLRGLDIEVNLIGMPTNGKNVGMEGVVRSFHNYDFLLFPVSFYIENAKGFRDYSDGFTPDVQIDDSAIYPGEFGTMMDQLGYLALQWIKTDNKPQLPSAMHTRGSCRSMRSFGDLWENRPVQPVGGAVMQPVREEMQRRRVNFHTLGCKLNFSESSTLAREFEAGGFIRVGVSEAADISVINSCSVTEHADKKCRNLIRKIHRRNPAAIIVVTGCYAQLKPQEIASIEGVDLVLSNNDKGELFRRVAALAGKGPAQFTSCDAEELTNFFAAFSSGDRTRAFLKVQDGCDYKCAYCTIHYARGASRNMPIADLVKEAEQIAAAGQREIVITGINTGDFGRTTGERFIDLLRALNEVEGIERYRISSIEPNLLTDEIIAFCASSPKFQHHFHIPLQSGSDSVLARMRRRYTTEKFAERIEAVRRLMPDAFIGIDVIVGFPGETESDFRTTYEFLERLAPAYLHIFPFSERPGTPAVDFPDKVQPSVATRRVEELEELCRRLHGEFCARAEGTTDEVLFESTMRGGMMFGYTGNYRRVKAPYDRSRINTICRVRLGRMDDANDLEGEIVDNMNLTELQAVFRKTVQGVTNTEFGRLHRNSFLQKRPDGTASPAAASRPKYRPFSQNTMRPGGKAASGRNAETKFTRTFAMTGIRRRMSIAFLSIVGLLFASGMISFLELSHLSYDTEEILKANQRNMELAKEMLGAVHDQNVAIVHLAILQDASYDSLCRTGMQRLEHAVATAQKGALDRSALDSLTGATTELLVLTKMFLATESPKAGDESGEVWYNEYYEKQYEKVVTAVRDYMTSTQSSLAPRAEQLKKNAYRAVTPVLISLVVMIATVLMLFYFTMLYCVNPIVAMNKGLGQYLTFRIPFAVKAECKDEILELKEKIEALVAMLKQNKAMRVNVILRYVGMIMLLLAFFMFVSAGISYVNHMDSAFYPLLLSALLTALLGGFPLIFVEKQDRITNKEGFCIVVGSWLLACVVGMFPYLIWGGEFSVINAWFETVSGFTTTGSSILQNVEALPRGLQFWRMSSTWVGGMGVVMFALVILPALGTSKMMLSSVEMSTLARDNYRYRAQMVVQILLFVYVGLTIFFTFMLKFAGMNWFDAVCHSMSACATSGFGTKNTSVAFYDSAMIDMVLIFAMGISGIHFGLIYATVTGKRNNIFRSEVTLFYLGMLILGSLLIALSLYIADIYPTFRSSLRFASFQFVSVTSTSGFATADSSLWTPFAIILLILGSLICACAGSTSGGMKANRALMALKMLYIRVKQQQHPNAVIRLKMDGVIQEAGVLHTVSLFIVAYLLLILIGTILCTLFGVDLMTSFSGCVASIGNVGPGFGGVNSMANYGDLPAIVKFIFTALMLLGRLEIFGLLQFLLIRWWKMMWHKLLIGLFLTFSVVIVRGASDPAGPGIPALQSNSEYVALRDQDSRLQVRIDEMQTRIAGLRAMLRENPAAQETYGAQILSLESEMLSAQGLRTQVAARINAIEQAWLTEHPDYVPAAETEKSLITQTPESQQSRNLVFNGYFRENLPARDYEALLRAQRMEAEVAGCAGRLLENYRQQTLLKQQYDTVRTEQAAVDLFGRYRTVANLGRVLRDSLTAVWGYVYDNKSYAYDYILDKLNCRDQQARQQKALDDVRRQMSAAQAEGLVDALPDYYIQKCYLTDYEREIARMLGLGLASDSLKQVAVRLQTIDFRLPKPEITERYFLDYEPVQFVAGRYTYKKPIPDCPVYEHGVIYRILLGEYKYKQNISIFRSASPLYVLKTDAGRYRYFAGGFATKAEAVDAQELLRAKGFRRPELVVWYDGEYTNLTRTPEAEMAAFRVEISSEQNLSDTVKQAIAQAAPGCDLSRVGADLFVVGQFDNKAVADQAAAAIRAADPQLSVKVTEIAKMFFIILLVFFGLLFLVAELVLLPGVSIGAILALVSYGGAIYIAFRDYGPLAGGIVVAVVLILSFAATVVSLRSKTWRRFSLKQKVDSSVMPEPVQQSVRVGDTGMTVSRLAPMGKVEIGGKIYEAKSMDSYIDPRREVEVVGFENFNIIVRKHIKMEIGIIALIVFVSLFAIWLIFYFIPVGLWFSALVSGVRISLLQLILMRWRKVPPSTIVSSMIESTKAGLELNPNELEAHYLAGGNVTNVVHALVSAQKANIMLDFKMATAIDLAGRDVFEAVQMSVNPKVINTPPVAAVAKDGIQLIAKARVTVRANIKQLVGGAGEETVLARVGEGIVSSIGSAQSHKIVLENPDSISRVVLEKGLDAGTAFEILSIDIADIDVGKNIGAQLQMDQAEADKNIAQAKAEERRAMAVALEQENKAKAQDARAKVILAEAEVPLAMAEAFRSGNLGVMDYYKMKNIMADTTMRETIAKPDKKMAKKTASPHESSSEGNQIAITVTEKGPYLVTGNPPLAMQFIMPDSEGESWYFQEGRHFSTEKEPTALCRCGLSRSKPYCDGSHLKEEWDSAITSGEDRIMDEVEITEGQRVTLNDNEKYCVFARFCHPYGGVWDLTAASGDSQSRKLAVREASMCPSARLTAWDNRTGKPYEFIFEPSLGLIEDPAIGASGGLWVRGGIRIQREDGRTFEVRNRVVLCRCGHSRNKPYCDGAHAAVKWKDGLEGTPDGETLPRSVASAKIETHMKKLVCRFLCLGIVLAVSMNLVGCSDDDGPVGTLYFPRDVCMVDKPGGTASVEFTAVNIVKLNITDTPEGWTVTADLQTSRMTVTAPASDDSNAETGGVLTLVGYDTDGKAVSADLRVGIGRTVDLTGQTANCYIANYANAYYTFDGTVKGNGEKIPTARVELMWGSTSHMIENLTLDDGRVSFFVAADKKGEFIEGNALIAAFDAQDKVVWSWHVWVTQYDPSAESVTSAAGDVFMTRNLGAGAGGNATEDDIYLSYGLYYQWGRPTPMIGPAYYNCAFAEDHKMYNINGRLTYLDYVESTPETGTMEYAIAYPMSFILGVEESGYDWLYSDHDNELWGAVKTVYDPCPKGWKVPDKDVYADFMIGDDHDQEQTEALREAYGWNLTDGTMTSFFLGGGRRPYLTGLIQNVNSNADAQPWIGCYWTSGLGTDELSASGLYFSLDTDDAASSEFVPARNYQRANGLQVRCVREMTVLAIWSVSAVVSLPGLAISPILGDLNKVFPRATDLEIQMLTSLPSVLIIPFMLLAGRLSVTGNKFKLLVVGLAVFFLSGFACLFINQMWLLILVSCLTGIGAGIIIPLSTGYIVDYFTGDYRIRQLGYSSSINNLTLVLATMLASYLANVDWHLPFLVYTLPAIPLILSVFIRRTPAAPEPVGSDELKHKKVDWPKLAAVMGFYFLATFLSLVIAFYISFLVDPHGNRNSFSGFLISLFFLAIMLPGFFLSPIIRRLRSNVNLISLVMICAGLLFIGLFKAHFWLIAGCTLVGLGYGIIQPIVYDKAAAAAPPQLATLALSVVMSVNYLAIVLCPFIIDLLRNILHMQGERFPFILSAGLAFVAVLLTWRYRNSYAFGLDKSYYRQMKQFFLILSGLALLTGCSSKNDSVEGPVQSRIRIAPSISRVTGLNFDTGDRIGLTIVKSGANYCENTPLRFDGTVFVSDDLFWYDDPSEKSNLTAYYPYLAEGAPASFTVRADQKLAADHEASDLLAATATDVVPSQTAVNMVFTHLLTKIVIDITNNSANTIEEVTLKGSRCTATVDLSAKSVQVDASSAETDIYPFPTVTAGRYEAILVPQRAALELEIQTSDGNRHTKTFQATDLQSGAEYAIEAVISNTNKIHASISGAVKGWEDGGAIAPVEDDLPEDSDLLEYAGVKYRIRQLSNGTTWMAENLRYIPEDKRVSSSPSEENGIWYPCTTSFTASSDTEYIQRQGLLYDLATAVGEPVTADNFRNIEGVQGICPEGWHLPTRADLESLIAMNSELGSSFFTYAGTRDPSGKYIGSLMSGDFSKGYLLCTSTESSVYTPEDLNYQYLLFSKSNQVNIIDIDCRSGMPVRCVKNPASGKMRNLSRHAGPNRMMFLLLIPCLLLSALRAKAEETALPEGKRPGVTLQVEMDLVSSYIWRGVYEAGPSLQPGLTLGIGNFTIAAWGSVDFTSSSYKEADLMLSYRLKNITFHLKDLYDEGSASDRNPQISRNYFHFGADSPHRIEAGIEWQVSRKVPITLSWYTILFGARDVDTRGRRCYSSYVEVAYPFTVKTIDLKTGVGAAPWKTAGEGGAKGFAVKNVFINAGKLWAVKSMGSFRIGLFTHLSWCPLKEDMNCVGGISLRMMNRFLLIGLLMLKGICTTVAAPLLSVVTGTVQDASTGEAVIGAAVILQNTTYGAVADADGRFVINNVKPGTYTIEVQMLSYQRVVIEGCQIKPGENTLPLISLQPSAEEIDEVVVTTVRRLSSEAAVMQAVRNSKMVVSGVSKQMIARTQDRDAGEVVRRIPGISIIDDKFIVARGLSQRYNNVWVNDAAIPSSEADSRAFSFDLIPAGQIENIMILKSPVPEIPADFTGGFVKINTKDTPGELPFALSYSIGFNTATFGHDFLYNPGSGSDWFGCDNGKRGVRGGITGAFDNDDPDFVTDMTRHGFNNDWSIKTRKPIPDQRFSFSYGHSFRLGNGADLALNGALNYSYATRTFSNMENSRYGVYNKVEDKPEYYYKYTDDQYQTNVKVGALLNLAYLNGKNRYYFRNIFNQIGQDKLTLREGWQNMSSLYIQEKTEYCYTSRSTYSGQIAGVHTLELGTLDWDAGYSYADKNQPDRRIVNRQENDMVGDAHYGQMQIDQNEIRRDFMKLREHIASAGINYSCTLREGSSFAPELKVGLYGEYRTRDYRTRAYFYRFDTDNLPADFAYGDVIDDILQDGNYGADKLYIYDDSDNRNSYKGDNILTAAYAGIDLPFGRWNVYAGVRFEYSRMALTSYTKIKDWDSETRNYTHADPFPSVNVTYRINDKHLLRAAYGMSTNRPEFREVSPSVYYDFDLFSDVKGNADLKAAYIQNADLRWEWYPAAGEGISVAVFYKHFRNPIETAILDAGSGSYTYTFENADRANLYGVELDVKKNLDFMGMRNFSVVLNGSLMKSRVDFDDESLEHDRPLQGQSPYLVNAGLFYQSPKLGLTVGVLYNRIGKRIVGIGRSDMSVGGSIDNDIPDMYEMPRNALDVVVSKSFGKHWELKFNAKDLLNEKVQFAQFPKFENGGDVVSRKQITKQFTAGRMFSLSVTAKFMKKILWAACLMAALSLAGCSDDENGNGGNGGNGGSGEGGNPSGGDLTEILFEDGTQIGDGRQEFEIKGDYTLPKGTYLLKGWCYIADGASLTLAPGTIIKGDKETKAALIVEPGGQLWAKGTQSEPIVFTSEMPAGSRRPGDWGGIILCGRGVNNKGTMQIEGGPRTTHGGSDNADCSGALSYVRCEFAGYPFKEDQEINAITFGSVGSATQIDHVQVSYSNDDSYEWFGGAVNAKYLVSYHTWDDDFDTDNGFCGKVQFCLGVRHPRIADTSASNGFESDNNGEGSATSPFTSCVFSNVTFVGPVGQDAAFSNTSDYITTGDMNPKNGSKLGQFQSAMQVRRNSHLNCFNSVAMGFPVGLIVENDKGSQTQTAASEGTLKIQNVYMAGMTVLGSDVNKSFEDGFCDNGDKNSIDKSKESFSSTYFKSIASNKYFDAIADLKLSQPNSLQANPNYGPLSDSPLRGAASFTDPLVANGFDEVTYIGAFADENDGWMSGWTEFDPQNKAYMKRRVTREEIIRTTRDLIIRNGIRAVRVDEIAQKLEISKRTLYELFSDKDTLVEQCWDKIREEQEKKIAGYLFYQPGSALEQARNLIQEYIAAVCMISCISLQELQQKVSYADSYEKNRRFWLDSFTEVLEHCVADGSVLPDVDCQLFAKRLMNVLLGLYLEGGTRREMDAFGWALLRGIATHRGIEWLDGKKPNSMKKLIIILAAAAMAGCGIYKPYTRPEEIKTDGLYGQGVETVDTMTLGNISWQEMFTDPYLQQLIQQGLDNNTDLQSAYWRVKEAEATLKSARLAYLPSFNFAPNGGVSSLTNPWNATWTYTVPATASWEVDIFGKLTNSKRRAKALLAQSQEYQQAVRTQVIASVANLYYTLLMLDAQYEISSETAEKWLETVNTMRAMKEAGMTNEAAVSQAEASYYSIESSLFDLEYQIREMENSLSSLLGEAPRSFERGTLDEQILPENLVVGIPAQMLSNRPDVKNAEYSLAQAFYNTAGARSAFYPALSLSGTLGWTNDGGVTTLDPAKWIFNAAASLVQPIFNAGRNQAQLRIAKAQQQEALLSFQQTLLNAGAEVNNALAKCQSARSKVDLRQKQVASLETAVESTQLLMRHGSTTYLEVLTAQQTLLSAQLSQINDRFSEIQAIVDLYHALGGGREIESETDKMTLKHFIDRPVLAAVISIVIVLGGIIGVATLPVEQYPDIAPPTVMVRASYPGASAETIQKSVIIPLEEAINGVENMMYIKSEASNAGSGSITVYFKQGTNADMAAVNVQNKVATATGSLPAEVTKIGVTTMKRQSSMLKVFTLSSPDDSYDENFLSNYLNINIKPRIQRIQGVGEFFALGGDYAMRIWMKPDVMAQYKLIPSDITGVLAEQNIESAAGMFGENSDNTFQYTMKYRGRKMTPEEFGEIVIRATSDGQVLRLKDVADIELGQDSYAYHGMVNGHPGVSALVFQTAGTNATQTVEEIDAMLDEIATELPKGVEITHLMSVNDYLYASIHEVIKTLIEAIILVILVVYVFLQDIRSTLIPTISILVSLVGTFAFLSFAGFSINLLTLFALVLAIGTVVDDAIIVVEAVQARFDSGYKSSYLATVDAMGGITSAIITSTLVFMAVFIPVSMMGGTSGTFYTQFGITMAVAVGISALNALTLSPALCALLLKPYVDEDGNVKNNFAARFRKAYNTAFSAVLKKYQRGVMVFIKHKWLTWATLGLAMIGLVLLMNNTKTGLVPDEDQGTIMINVTTAPGSSLAETNKIMGKVGERLKSIPQIRDFQQVAGYGMIAGQGNSYGMCIVRLKDWSERPDKADAVNAVIGQIYARTADIKDAQIFAVAPPMITGYGTSTGFEMYLQDQTGGDITDFYNIYLQYIYALNQRPEIQMAYSTFNINFPQYMVDIDAAKAKRAGISPTEILSTLSGYYGGQYVSNINRFSKVYRVMIQADPKYRLDPESLNNVYVRMQNGEMAPISQFVKLTKVYGSEVLSRFNMYNSIAISGTVADGYSTGDAIKAIEEVAEQVLPKGYGYDFGGLTREESQTGSNTAIIFGICIILIYLILSALYESFLIPFAVILAVPCGLLGSFILVKLIGQENNIYLQTGLIMIIGLLSKTAILITEYAADRRKSGMSLSQAAFSAAKARLRPILMTVLTCVFGMIPLVIATGVGANGNSTLGSGVVGGMIVGTLALLFLVPSLFIVFQHLQEKVKPIQFTNTPDWMIEAEIEDSKKENEEKKMKQKLIQAVLFGSCMAFAVSCGQAPTARGEAEYSVMTISTSDVTIPSTHSATIRGRQDIAIYPQVSGTISKVCVKEGEVVRQGQLLFIIDQVPYKAALQTAKANVAAAEASVATAQLTYDSKKELFAKNVVSQFDLQTSQNNLLTAKSQLAQAEAQLVNAANNLSYTEVKSPSNGVVGVLPYRVGALVSASIPQPLTTVSDNSDMYVYFSLTENQLLDLTREYGSMDKALAALPNVQLVLNDGSLYSQEGRIESISGVIDTSTGSVQLRAVFPNPGRLLHSGSSGNVLLPHIYKNVVTVPQVATFELQDKKFVYKVENGVATSQNITVSPQSDGKNFIVTAGLTPGEVIVTEGVGLMREGTPIKPKGAATTATAPAEQPTKEQMSAANPIAVSEEEPFVIGKSDLAYFFNNPCRCDCALVLLCTSGHAQVTVDLRRGPLQLNTIVLLLPGSVLMFDDASADFSVRFGAFSPDLFGEAGFRLGLSFFSFLKENPISQVNERMAAGLSTWFEIMDYTYQDRGNMFRKTIVRNRLQNIMLELYDKIQRKVSSQCPTTSNRQMELFHRFVSLVHDCCIEEREVSFYADKLCISTRYLSAIVRRTTHQSAKELIDKIVIMEIKVLLQNTTLPIQEIAYKMHFPDQSYLGRYFKKHTGISPSAFRQESRMFIVMQLANRQNIIRKWGNGQPYGQVPPFVFRRKENTFAKSRGNTCRCMPMKLLIVEDESSLRELLARALRKEQYVVETASTYAEASDKLAAYSYDCILLDIMLPDGNGLQLLERLRRADKRENVIIISARDSLEDKVLGLKEGADDYLPKPFHLAELSARIQSVIRRSRGGGKGGIALGNVTLDPESCRVEIDGKEVALLKKEFDILSYFMQRPRHVVDKAVLAEAVWGDHVDQSDNFHFVYSQVKNLRRKLEEAGASIEIKAVYGFGYKLIDMKLIYNISLRLSLVLFPLIALWAVVFYFTMMDEINDEADDALEDYSELIVMRVLAGEPLPRSNEGSNNSYTIIPVESGYVATRPSIDYYDTEVYIPEKDETEPARVLATIFQDKDGNFYELKVAMPTFEKDDLLETVMWWVVWLYLFLLVTVSGTTLWVFHKSMLPLYELLHWLDSYAPGREVAPVPNDTSITEFRRLNVAAQQAVDRSEELFERQKQFIGNASHELQTPLAVLGGRMEYLLDCADLDEETTGEIIQMRRTLDHIVRLNKTLLLLTKIDNGQFPESTDIDLVPLVEERKALYDDIYGEHKIRCRLHLPGTFSVRMDESLCSILVSNLIKNAYLHSADGAAVDIRIEGNVLTVINDGVSPLDEKHIFERFYQGSQKEGSTGLGLALVKAITDYYRLGLIYYFENGRHHFGVSWRMERIWNFDILTKYFFRTRLYISIPRSETGRYASTFLRERDFGQSQNRMKNTRKMMAFLIGITLLTISPAYADHDRAVTTEQMPRQAQEFIARYFPGEKIAYAKKESDFFEVIYEVMFTNGSKVEFRRNGAWKEVDCRYSSLPAGIVSMPIETKVQELYPGAAVIKIERDKQEVEVKLNNGMELTFDRSHNLIGIDDMNTKKKTLSVLTMAATALLFAACDKDEVGGPGDSHISQEVLAAFNARYPGAQDVRWSLRGDYAVANFFFEAARTESRANNAAWFENANGQWAMTETNIDFAALPQAVREGFDASKYTEAEGWTRTGKVDKLERKEVVGAGGSEGVTVVYVIGVTRTADGITTGMDLYFSTEGVLVNEVTNAADDGYEDYIPEKPAAGIEQQIQGYLDDNGGGSVIDVDREYGGTEVELVCGGYKHELYFDAQGNRIYAKIEYGRRDIGSAVPEAIYNAVAADQQLSSPNDIDDIEKWSLDKATADGISVFWCVEVETRHKEVDIYVNDSPVRIIPRPVIDMGNTGGNGLPVEDEIERFLNDRYPGAKVVERDYDDGCLELTILHENLRKEVLFDGRNNWLRTEWELHRLPQNILDAVQQAGYTLDDDEFECIETSGGMWYEFEARKDRREYDLRVDTNGNIEAYEDMKKMILAVALLLTGIVSAQADGREKPITIDNLPKAAQEFLATYFKDLTVAYAVEESKYFGSEYEVTYTDRTEVEFRADGQWSAVDRKYSAVPAAIVPQQIADFVAKMNYPGQFIRKIDRDAYSWEIELSNGLEVEFDLNFNVIDYDDMKSGSGKRWVWITGVVAIFALLFAIAWNIECERAVAPQELPGEARSFIAQHYPEENPVLVIKTLDELAVTYKVVFADGTQVKFRRNGMWREIKSRSRAVPSAVVPAQIADYVARNFPGTFLVGIEHTCREWEVKLNNTIELTFDDKRFALKEYDDMCIVYYCGCELLRSVVQTDFCFPFRRIQGGDGLSLQMVVKSGCSHRCIGGVRRIIFKLNIEIGSCGMEDACGKVKTKPPGKAAMINYLQVENLTKSYGDLVLFDNISFTIGEGQRIALIGRNGSGKTTLLNILAGKDTADSGTITPRRDLRIAYLEQNPEYAADLTVLEACFRSDNPALRAIAAYEQAVADPAQDGLQEAMSRMDALAAWDYEQRAKEILSRLKINDFDKKIGQLSGGQLKRVALAAVLISEADLLILDEPTNHLDTDMTEWLEEYLTRNKAALLMVTHDRYFLDRVCSDILEVDQRSVCLYKGNYAYYVEKKQERAEAAEARRESDLNLYRRELEWMRRQPQARATKARARIDSFHELDARLKSTRTQASLKLDVQATRIGTKIFEAKELCKRFGDLVILDRFNYNFARYDKLGIVGDNGCGKSTFLKLLTGIIQPDSGTIEVGESVRFGYYSQQGLDFDEGKRVIDIVTDIAHEIHLGDGRRMSASQFLQYFLFPPEVQYSYVARLSGGERKRLYLCTILIQSPNFLILDEPTNDLDIVTLGVLEEYLQAFKGCVIVVSHDRYFVDKVADHLLVFCGGGEIREFAGTYSDYTAWKRDYEAAKQAAVAQEKAKSTASGSRGGEIRKSGTAPAKTGAARKLTFQEKREMEHLEAEIPELEQEKAAIEEKLSSGDLPFEELTALSERITALMDQIDTKSMRWLELSEIGGMNRINTLFGIEYPIVQGGMVWCSGWRLASAVSNAGGLGLLGAGSMHPETLREHIRKCRQATDKPFGINVPLMYPQLDEVMQLIVDEGVKIVFTSAGNPKLWTGFLKSHGITVVHVVSSSKFARKCEEAGVDAIVAEGFEAGGHNGREETTTLCLIPAVRRVTSLPLIAAGGIATGAGMLAAMTLGAEGAQIGTRFAFAAESSAHENFKNRCLSLEEGDTMLMLKKVSPTRLVKGGFFREVEEAENRGATAEELKTLLGKGRAKKGMFEGDLDNGELEIGQVASLFREQQTAAEIVHDIVTEYRNLLNESKEKLSIMRPELTLIVTIALLFLFDLFAPERLRRYFHPLACVLLTVQILVNIVPTPDSGQLFGGMYQYEPMQSIVKSMLAIGTLIVFLQSNEWLRREDTAHKRGEFYLLTLSTLLGMYFMISVGNFLMFFLGMELASIPMACLIAFDKYRHNSAEAGAKYILCALFSSGLMLYGISFIYGTAGTLYFDDIRLDGSPLQIMALVFFFSGLGFKLSLVPFHLWTADAYQGAPTTVTSYLSVISKGSAAFVLMTILIKVFAPMVQEWRTILFVVIILSITVANLFAIRQQNLKRFLAFSSISQAGYIMLGVIGGSALGMTSLVYYILVYMAANLSIFGIVSAVEQHTDGKVCIEDYNGFYRTNPKLAVLMTLSLFSLAGIPPFAGFFSKFFIFAAAFKEGFHLLVFIALLNTVISLYYYLLVVKAMFITPGEHPIPTFRSDRGTRLSLALCTAGVLLLGIASVVYDSIGAFAFGMMNILSLFPLIPLVMMLGLWISKNTRQIHAVMVAGSSALLALAIYLVFHYLGLREAGATDAMLLTDSVVWYAPLNIHYAVGVDGISVAMLLLSAIIVFTGTFASWQMKSDVKAYFLWFCLLSVGVFGFFITVDLFSMFMFYEVALIPMYLLIGVWGSGRKEYSAMKLTLMLMGGSALLLCGILGIYFGAGAQTMNLHEIAALHNIPLSQQYIWFPMVFVGFGVLGALFPFHTWSPDGHASAPTAVSMLHAGVLMKLGGYGCFRVAMYLMPEAAHELSWIFIILTTISVVYGAFSACVQTDLKYINAYSSVSHCGLVLFAILMMNTTAGTGAILQMLSHGLMTALFFALIGMIYGRTHTRDIRELSGLMKVMPFLAVGYVIAGLANLGLPGLSGFVAEMTIFNGAFMNNDTFHRVVTIIACTSIVITAVYILRVIGRILYGTCRNEAHLKLTDATWDERLTVICLIAAIAGMGTMPLWISDMVSGSVSTIISQLMNMDFTILILVLPLLSFLVLGLAGTKLKPGAAGAIGTVVLGAVTVLSYLTAILYFGAGRNAEGIFPTLMPYNAVWLPISQTLHIDMGILLDPISVMMLVVISTVSLMVHIYSFGYMKGERGFQRYYAFLSLFTMSMLGLVVATNIFQMYLFWELVGVSSYLLIGFYYTKPEAIAASKKAFIVTRFADLGFLIGILFYGYYAGTFSFTPDAQLLAAAGTMIPLALGLMFIGGAGKSAMFPLHIWLPDAMEGPTPVSALIHAATMVVAGVYLVARMFPLYIGYAPDVLHWVAYIGAFTALYAAVVACVQSDIKRVLAFSTISQIGFMLVALGVCTSSDPHTGGLGYMASMFHLFTHAMFKALLFLCAGCIIHAVHSNEMSAMGGMRKYMPVTHITFLVACLAIAGIWPLSGFFSKDEILTACFAFSPLMGWVMTGIAGLTAFYMFRLYYGIFWGKENKELHAHHTPHEAPATMTVPLVVLAVITCVAGFIPFGDFISSDGEAYTIHLDGGVVAISLTVAIAAIALATWMYLRAKQPVADRLATTFSGLHKAAYHRFYIDEAYQFVTHRIIFGCISRPIAWFDRHVVDGFMNLLARTTQSAALGIRFMQSGSVQRYCIWFFAGTLGLTLLLLILRMIHMEYYLIVSTIMMFVGIYGFVTRRNLLAMLISVELILNSVDINFVVFNRFLFPGQLEGFFFALFAIGISAAETAVAIAIIINIYRNLRHIQVKDLKKLKWMEITLDLIVFTVLAVFTLASAVLAVTTKRILRAATFLLFVLFGTAGIYFQLNYSFLGAVQLLIYAGGITVLYVFSILLTSSEGDKAEKLRGYKFVVGILATLAGLAICLFVTLRHQFLPEHFEHGELAVREIGFALMSPEKQGYLLPFEVISLLLLACIVGGILIARKRMANYIQGLFHGIRTLLTGLKVTGKEFVTPKITEQYPENRATLKMNERFCGTLTMPHDAEGKNKCVACGLCQAACPNGTIKITTETVTDEETGKPRRRLVKYEYDLGACMFCHLCVNACPHDAIRFDTAFEHAVYTRDKLVKTLNKMFDFSIVTSWVHELLTSFMPLGLAIFIECVIVGLCILLMYVVVAILMIFMERKVCAAFQCRLGPMRVGPWGTLQVFADVFKMLTKEIITIRRSDKFLYNLAPYIVILASVLAFSCLPFNKGMEILDFNVGVFFMMAASSIGIVGILLAGWSSNNKYSLIGAMRSGAQMISYELSIGLSILTIIVLTDTMQFSEIVARQADGWFIFKGHIPAMIAFVIYLIAGNAEVNRGPFDLPEAESELTAGYHTEYSGMHFGLFYVAEFVNLFIIAGVASTIFLGGWMPLHISGWEGFNTVMDYIPGFVWFFGKTLFVIWLLMWIKWTFPRLRVDQILTLEWKYLVPIGLVNLLLMVVIVVFKLHFMNLQEIITAKVPGAVYTEAGDGMFTIPVEQFHDLARYLHDDPALRFDFLRSLTGMDWGEEGLGAVYHLESTATGENVVLKVLTPSREQCGLPTVSDIWKGAELNEREVFDFFGIGFINHPDMRRLYLRDDWVGYPLRKDYDQSGETNPLRMTNEVAHDSSPSYELQPDGSIIRRRNVLFEEDEYVINIGPQHPATHGVLRFRVSLEGEIIKKLDVHCGYIHRGIEKLCESLTYPQTLALTDRLDYLGASQNRHALCMCIEKGLGVEVSERVQYIRTIMDELQRIDSHLLFFSCLCMDMGALTAFFYGFRDREKVLDILEQTTGGRLIQAYNTIGGVQADIHPEFVKKVKELIKYLRPVLKEYHEIFTGNVIAQQRLKGTGVLTREDAVSFGATGGTGRASGWACDVRKRHPYAMYGKVDFREVLFTEGDCFARYMVRMEEILESLRIIEQLIDNIPEGEYQLKMKPVIRVPEGSYYAAVEGSRGEFGVYLESRGDKSPYRLKFRSTGLPLVSCMDTITRGAKIADLIAIGGTLDYVVPDIDRMKYEDFTDNEYLEKMIEELRANGTNVVMGCLDEVINWGRSNSLWPLTFATSCCGIEFMAVGAARYDFARFGFEVARASPRQADFIMVAGTITHKMAPVLRRLYDQMADPKYVIATGSCAVSGGPFKKSYHVVNGVDKILPVDVYIPGCPPRPEAMLYGMMQLQRKVKLQKFFGDVNRQIDKKEYEKRLREDLTAERPELNVEPEEKKNVMYFVLLMVVILTAIGLVAIALGVARAISPRSYNPQKGEAYECGIPTRGKSWMQFKVGYYLFAILFLMFDVETVFLFAWAVVVQEIGVFGLVSALFFLLILTFGLAYAWRKGALEWKMAGKIGYFLFALLVLTTGTLCRQQLPVQYASGGDSVGSLTQHVPPQEKSGLHYFHHSFIASETVSEVIAPMLHINCRQLASATPSLRPSEKSPLPCSNRPANPHPDAVDYYVFSLGKIRIMEKGIHYIENVFEYNDLLGVETLHPLVSVIDLSKAHPMKHVRHIFGFYAIFLKEVKCGDLLYGRQRYDYQEGTLVCLAPGQVIGIEDNGEVYQPKGWALVFHPDLIRGTSLGRNIREYSFFSYEVNEALHLSEREREMVVGCFLKIRQELEHAIDRHSKRLIAINIEMLLDYCLRFYERQFITRSNVNHDILARFERLLDDYFAGDRAQREGLPSVKWCAGELCLSPNYFGDLIKKETGKSAQEYIQLKLIATAKERILAPNKTIGQVAYELGFQYPQHFTRLFKKITGLTPNEYRSAEHPASMEAMLFQVAERSLRFCRLFETKNVNGKIRFFRVRPGRILTIARIVKGRRQAKFNVLFSSSLHSRVHQCPLRMLRASVVRACPSRIFSSAKIVKAEKKTGACSQFSEACPIFCKDKRFIRFPDASSGKNRNFGKKLRNLCQGTIDQPRITGAESVIRVISPVICFLFFRAEYPIFAKTRRGKFESRRSKNRDVRKNPLRDENKQLNLIGMKTNLNYDMFVPTRTLFGAGTLNELHAQPMPGRKALLVISNGRSTRANSYLSRTEEQLRMAGVETVLFDRVEANPLKSTVMAGGAMARENGCDMIVALGGGSVMDAAKAIAVVASNGGDYWDYIPCGTGKGKAVAETPLPIVAITTTAGTGSETDAGCVITNAETHEKTGFVHPGLFPVLAVIDPELMLTVPPKFTAFQGFDALFHSTEAYISNAANLMSDMYVLNAIENVARYLPRAVADGSDLEARTRVAWGNTLSGSVMCVGRCTSEHSLEHAMSAYHQELPHGAGLIMISKAYYAHFIERHVCDERFVAMARALGVEDAREPMDFIRALEALQRACGVADLRMSDYGISPDEFPAMVRNARETMGFLFPFDREPLSDEECEAIYRASYRMSKKVLILSSSPRRGGNSDTLCDEFLRGAQEAGHEVEKIFLKDKTIHYCTGCGVCNEGKPCPQKDDAPEIVRKMVAADVIVLATPVYFYTMSAQMKTLIDRCCAGYLEIRDKEFYFIVAAAETSVAAMERTIDGFRGFLDCLDNPQEKGVVYGVGAWHKGDIQGKPAMKQAYEMGRNIMKVRLSILAAFVTILSFGCCQAQSTNVLNMKNETIFPQIFPQGDRLPEEFSRYFTGQAYLASISNNEALGTHISNVTFEPGCRNNWHSHTGGQLLLVTAGRGYYQEKGEPARELRPGDVVEIPADVVHWHGAAPDSWFSHLAVECNPAANVNTWLEPVGDAEYEAATAMSWCRPGLSAAAVKNAEMWFPGEAPAFVKTDPELAEVFGNFAFDEVQRYGKLDVKTRILVTMASSLAQQAAATYEMTLRAALANGVAPVAIREVLYQAVPYVGMAKVVDYIALTNDFFRKNGVEPPLEPQAITTPETRMEKGLALQKEIFGDEIERMYETSPANQLHIQRALSGNCFGDYQTRTGLDVRTRELLTFSMLVSLGGCEPQVKGHIRGNVNVGNDKDVLLAVVTQLLPYIGYPRTLNAIACLNEVIPERGMEYVKLNNGVEMPILGYGVYQVTPEECERCVSDAIKIGYRSIDTAQAYHNEEGVGRAVRKSGIPREEFFITTKVWITNGGYEKAKASIDESLRKLQTSYVDLLLIHQPFNDYYGTYRAMEEACRVGKARAIGVSNFYPDRYVDLAAFCEIKPAVNQMETHVFCQQVVLQEIMRRYGTQLMSWGPFAEGRNGFFTNGTLRTIGEKYGKTVAQTALRFLIQRGIVVIPKSTHAERMAENFDVFDFELSAEDMHSIAVLDRKESLFLSHYDPETVEYLINYEMKKEDELKELVKRRYDELALNSDSLKCGCCCGTAPAQPSQNVFTIMSEDYSRLNGYEPDADLGVGCGLPTRYARIKPGDTVIDLGSGAGNDCFIARAETGADGKVIGIDFSPQMLAKARANAAKRGCDNVEFREGDIENMPVRNDTADVVVSNCVLNLLPRKDRIFKEIRRVLKPGGHFCVSDVVLQGIFPKEFTDNAAMYAGCIASAIQQEDYLTEIRKAGFADIQIERTKKIVIPDEVLQAYLDADTIQKYKAGNVGIYSITVTGQKRTMEWIQRLLESGTTPIVTAFLLGLLTAISPCPLATNIAAVGFIGKDIDDKHRVFCNGLLYTAGRILTYAGIGLAFIPLLREGANTYALQKIIGKYGDAIVAPALILIGLFMLFGHRLNLPKFGFSGHCEKIGRHGSWGALLLGILFSLAFCPSSGVFYFGMLIPMAAAEPGGWFLPVVFAIATGMPVVIAAWILAYGAAGVGIFYGRMQIIRKWLARTVGMLFIAVGIYYWIIYFFMKAATLLLAAALLYACGGSRHRVTVEAVADDCVQVLYFHGKQRCATCTAIERLTREVIDSIGSEKVVLRIIDIAENEALADRYQAGWSALILDRNGRVENLTRMGFSYAKDQPATFKARLNDAITRMSKMEIKVLGTGCAGCRTLYETVTQAIAELGISAAIVKEEDIAEILSYGIMTLPGLVVDGRVVSAGRKLSLAEVKELLNRMSPKAYTEQEEQLARFAKAMGHPARMAILRFLAGQESCFFGDIHEVLPIAKATVSQHLKELKAAGLIQGEIEAPKVRYCINRENWAKARESFADFFCECGKKNSCCGMIESTDTTIRKRSLAEEMAVRLQEQIAQGRFEVGGKLPTESELMKIFGVGRSTVREAVKILANMGLLKVQQGAGTFVESRTARNESMERCMQRADIGDLEEVRRILEVAIVERAAQRRTQADIEKIGTHLARRGAAAAAGRLNDCIAADVDFHVALSEATHNEILHELYRAASVHLQKRLEHIYTDTGCLLASQSTHERLLRNVVAQEPRKALETIAVILQEPMNTAAKSVRSYRSLTSRTVYPILLMVSITHLLNDMMQSVIPAVYPLLKEKFDFTFAQIGLITLVFQLTSSLLQPVAGLLADRHPRPYSLAGGMCFTLAGLLVLAFAPGFVWILIAVGLIGCGSSVFHPESSRVAQLASGGRKGLAQSIFQVGGNAGSAMGPLLAALIVIPFGQSSIGWFALTALLAIFILVRIGDWYKRRLAIAVRRPDAAETAFAHSLPRRKIHTALVILGILVFSKYFYIASMTSYFTFFLMDKFAVSVQGAQYCLFAFLAASAAGTFIGGPLGDRIGRKYVIWGSILGAAPFTLLLPYVGLAATVVLSVVIGLVISSAFSAILVYATDLMPGKVGMIAGVFFGLMFGLGGLGSAFFGWLADRTSIEFIFQVSTLLPLLGVITGFLPNIESKSGKMLPERKRKAAKKRGYDVRTDSRLRHNNSTRSIPAHIRSYDNNGRSGAVTPSNTEPQQKTRLQVIHYIGTRNGHSKESDQYDRTPIFFAKTIEMSLHIHPEPMKSLLLLIILMFQAFILHAQTETIDGFELGGSRITAIGAIGQKSGYKYQNSSTYDNGVKWIEYVRGDVRKPPHSTYDLYFIDDKLTKLEYYTSGFNSNMVEDKYMDLVVTYGEPLITGNSSVLWKTPTLKIKFSYGTGDNSTPFAAATYQYYYYSIAYEYIASTQTQSKQQRPISSGTEKQYTSSGSGFVIATNGIIVTNFHVVDGANGIDVFVNRNGEVKTYNAKVLISDKANDISILKIEDKSFTNFAQLPYAVKTPILDVGTSVFALGYPMSDILGEEIKVTDGIISSKTGYQGDVVTYQISVPIQPGNSGGPLFDKNGNLVGITNAGVPDAQNVGYAIKVSYLKNLLDSAPTPIILPSVNKINISMNARRVVQNCVLKNQSTVIEEMIRANLISEEYLYPFADDVMEWWLIDSWLAERLKAQGEVIIEEYGCYWWGRQSSGQAIYMDGVIQEICGNDMKTLDKRASEILRALLALQTSKIDNTDEAYMPVYIEIIDRSETYKHISLAHYGEQNGDMMRDPEMLFALHKETRQFIPYYYRNDYMGVEQYSVKWTDEGILLNRRLQADHTTFANQWLRNIAAQQGIRMKNRDCPLGHKKRTDFFKRSILRPLDKIGPNSAEWYLAYSFQIFPPNHPMKLIPAAKTIGPINSKANADKSFIFIMTGFIAFLFVVFLMLSGKYIVIGLFMLIFRILLTIYSIIAEILAAIFIPSKPFMHELEIPVYKDYFLLFDECEKAIQDVGYRGDIYLPVEDFFKFENKAMVSATPIVPSDPRFEENGFKILKLVPTYDSRIELTLCTTNNTVAVMRKLLKRLENETVCVFLNSTETILSLIYALRLQGRSRVFCSEKSVRKLKQMNFTDASETLDELAPVNFLTSRFYAAVDIKLDYKPHVILLTDVMRAPFSAVDPQTEVVQAIGRFRNGVARAYHIANTSDNLQCLTREALERRLTGEENIYNQIRQIQPDGEDEAQARFQALNGMAYKRFVTRDGNRNHFMWDNAWTDEQIKAYYRYPSTLTAAYKSAPFRLTVCTAHYPITDADRLRREKAKMNTRELWREVVGQLAKLQTAHSDMEPAFLQEELGNEFAAIVQAFTILGAKRMEELGYSRSKIEAAMTRTEENVLLTAPKMQEAVYAQYKTGDLVACSEINNFLHRLIVNNGIPFEGRRVDRKVVKLFFEIEDDTKRLGGQKAFLLGKKMFEFMDKTRIIVVEDNIVYCEFVCNLLAREGFRTVQAYHLSTAKKLLQQASDGDIVVSDLRLPDGDGIDLLRWMRKEGMTQPLIIMTNYAEVHTAVESMKLGSLDYIPKQLVEDKLMPLLHTILKERSIGRNRMPVFARDSSAFQKIMQQIRLVAPTDMSVLIFGENGTGKEHIAHHLHDKSKRAGKPFVPVDCGSLSKDLAPSAFFGHVKGAFTGADSTKKGYFNEAEGGTLFLDEVGNLALETQQMLLRAIQERRYRPIGDKTDKSFNVRIIAATNEDLENCGRAMYVDNIRQSSERMREMLNTLLDFFRLDNGKEQPNLSPCRISAITHILETEFMPIAMNKGLTLIVESHTDAVVLTDKERILQIGNNLLSNAIKFTDNGSVSLAADYDNGLLKLIVEDTGTGMTEDEQQRVFGAFERLSNAAAKDGFGLGLSIVQRIVAMLGGTIRLESEKGKGSRFTVEIPMQTAEELPEQTIQAQMRHNHICHDVIAIDNDEVLLLMLKEMYAHEGMHCDTCTNVSVLMELIRKKEYSLLLTDLNMPEISGFELLELLRSSNVGNSKSIPIVVTTASGSCSKEELIGRGFAGCLFKPFSISELMEITDKCALSSILDEKPDFSTLLSYGNESVMLDKLIAETEKEMQAVKDAEQRKDLQELDTLTHHLRSSWQILRADQPLRELYAQLHGSATPDDEAICKAVTGCAGMNMDTIKEIDVKSVMTKSSLPVGGYSVNPYVGCPHACRYCYASFMKRFTGHTEPWGTFLDVKNWKPITNPHKYDGERVVIGSVTDGYNPYEEEFHRTRRLLEELRGSNAEIMICTKSDLVLRDLDLLKSFPKVTVSWSVNTLDEQFCADMDNAVSIERRLKAMRQTYEAGIRTVCFVSPIFPRITDVKAIIEEVKDYADLIWLENLNLRGQFKGGIMTYIREKYPDLIPLYEEIYNKKRLEYWQALEQDISNYAKEQGFPYRINDLPYGRSEKGKPVIVNYFYHEKIRLTKMSVCIKSLIKNMNIVVGCTIGCPYCYARNNCRRFHITDDFSVPEYMERKLRIIDTSRPHVWLMTGMSDFSDWKPEWNAEIFERISSNPQHAYIFLTKRPDKISFSSDDENVWMGVTVTRSSEKRRIDDLKKNIKARHYHVTFEPLFDDIGEIDFEGIDWIVIGTETGNRKGKSYSRPEWVLSIAEQAKAHGIPVFMKEDLLPIMGDERMIQELPEQFTRRIQMISALGVNKTPRVHLTIPIQDIIGGVDMVLLTHNHIDHYEPSVPTHLPKEIPFYVQPQDADAIRNDGFTNVIPIEEIKTIDGISIYRTTGHHGFGQIGQMMGPVSGYVLKAEGFPTVYIMGDCRWEACIRDTVERFNPDYIVVNSGGAIFPEFSKTDGPIIPDENEVMQILDELPSHIKLIAVHMDAIDHCQTTRAILRNEATHHEADMSRLIIPEDGETVVLMVCPAYLIFKVALRTNCTVDVFFMTICLVIDYGCKVRKNPAKHLCLKKRMDEIINPDRLVSVPFNKTRCGVDFYINTAINKDIGLVLTENKRFKTDFFSFYFFRKANGYLLLNFRKIELRDGMVLLLSPHQQQEWHVDETALDYTFLIFREDFMRTFIADKFFVFRLLYCYQTDTPPYINATHDEMKEYMRLLGKIKYELMNPVSDTYNIIVSLLYYLLLIINRTYAAAYCLPAEIAKNNFAFRFKDLLEQNIRTHQRVQEYADMLHVSRITLNNSVKAQFGVSATHLIKQRLLEELKNELLFSNRTVSEMADDFNFSDPSHLMRFFKQQTGKTFTQYMTDYNKGIYEMKQNLDILDFTLSADDMARIKTLDTDKPFLLGSHEDPEIVKWFMQYKNAMFGAEDDGMQFQPDGYLLMFHPDLLRNTPLGRIMREYSFFSYETNEALHLSVEERQIIMDCFHKIQYELNHPIHRHSKNLITDSIKTFLDYCTRFYDRQFITRDNQNRDILARFERLLDEYFHDGAAKRIGLPTVQYCADKLCLSPNYFSDLLKKETGSTALHFIHDKSIEIAKTELASTDDTVNEIAYNLGFQYPQHFTRLFKKEVGYTPNEYRAQVSMMAKIVKGSDFKGAVDYIIDKKKDTQIVASEGLFMENLETIAMSFNAQSRMNDKVTKPVGHIALSFSKEDELRLTNRIMAGIALEYMKRMGIKNTQFFIAQHFDKEHPHVHIAFNRIDNNGNTISDRHERLRSTRICKELTLKYGLHMAGGKDNVKRNRLKEPDRTKYALYDIIKMEVGRCGNWNVLIANLKRQGVEVHFKHKGQTSEVQGVVFSMNGYHFNGSKVDRRFSYSKIDAALQHNRCRERMGITAGIYETATPSAPSGTAQSELFNGSWGLLKSSGSSYNAADAEANQEMVDILRRRKKVKRKRGVGFMEQTKEHKERNKGGRPKKEATEKLKYRIAVKMTAADYFRLLTRSHEAGVSPSEYMRECFRNGHVKERLSEEHAGYIRQLCGMANNLNQLARKANAGGFHDERWDCKVAVARIHELITKIGIQVRFGGRYGKTYCRKAVRRSVPSLRLGRGGNIIALAGVLYASDHVPYLLGKIAEQAPHIRPISFSFRQQASEPSFQHLEVGELTHPALLRYLQERGINIALAKAQCKELHFTHNGKPYFAIGFPNVAGGFEVRNRFFKGCVAPKDISHIRQQGEAREKCLVFEGMMDYLSFLTLRKRNCSNLPDLDRQDYVILNSTANVSKAIDVLHGYGRIHCMLDNDEAGRKAYRELERKFAGRIRDFSDNYKGHKDLNDYLRGIRQKLAVSPPPRTIVKPKKKGLGLMENFTRRVAGWFLLCLAMSMSLSAAAQQPPVERVDVETIPVQDDLEEMVIESQPESTNHPKQEKDVDTDDDDRAAAVRTDAGQDENVGQGELSQKDRRRDKGDGRENDDEDDDEDEDDDEDEGVRVQTHFEISAASGAQKEEKKAPPVTIDLLGTLRAKFEYQPGEGDARFQVRNARFGVAGEIYSKLAYCMEIDLSDEGKIKMVNAYLGTKLYKGLGFTIGFMRVPFTIDAHRSPHTQYFANRSFIAKQVGSVRDVGATLGWKFGEKVPINLQVGMFNGSGIDDQKDFWTDKFNYAAKAQFGFAEGMNFVVSYQTTRPADTRIHLYDVGCSYRLGGWFFEAEYLRKEYARNSFAGVNAFDGFFCYDLPLRRVFKKMSFAGRYDYMSDHSNGIPDDNGLLFVNDLERHRVTAGITFSFGLPFMADIRLNYEMYFYDKGVVPKVSEHDKIVLEFMAHFMESIYLGIVLFLFLLAIFDLVVGVSNDAVNFLGSAVGARAASFKWIMGVAAVGILCGAVMSNGMMDVARHGIFRPEQFYFQDIMCICLAVMAIDVILLDTFNTLGLPTSTTVSIVFELLGGAFALAMVKLAADDTGLTFADMLNSEKALSVIMAIFLSVAIAFVFGAVVQYIARLIFTFNYKSHMKWSAALFGGVAMTAIIYFILIKGMKDSSFMTPELSEWISTYTRHLVAGCFIFFCLLSQVLHWCRINIFKVVTLLGTFALALAFAGNDLVNFVGVPLTGYSSYMDYVANGNGSETFLMDSLNAPARTPFIFLALSGVVMIVALTTSRKARGVIKTSVDLARQDAGDEMFGSSGLARSIVRASSSLATGIDNAMPQGLKRWLGKRFDKDEAILENGAAFDMVRAAVNLLLASLLIALGTSLKLPLSTTYVAFMVAMGSSLADKAWGRESAVFRITGVISVIGGWFITAGAAFVATFLLALAIYYGGTIAMVVVVALTILFLIRSNIRYRRKMKAEHDDVFKGMMTSRDKAEVWTLLRRHMTESLMASVTFAESTFRQITDGLLKEDIKSLRKAERALGGEKDLLKRVRRRQMLAMRRIDRNLALEKNTWFHTASNASEQLYYCLKRLCEPCKEHVGNNFNPMPKVYLREFLPIRTRIFNLMVEIRRMMEQNDYSDIENVLIEAEGLRESISTERKTQMYRVQEEGNSLHVSLVYLITLQESQELVDTLRQLLKACNKFTKMGKYKILVVDDEESLCEILKFNLELEGYEVDVAYSAEQALAMHPERYSLLLLDVMMGEISGFKMARMLKSSPETAAVPIIFCTAKDTEDDTVAGLNLGADDYISKPFSMREVTARVRSVLRRSQARQEEEAICFEGLCLDLQSKVCRVNGQEVPLTKKEFEILTLLLSHPRVIFSREQILARVWNNEVIVLDRTIDVNITRLRKKIGPYGSHLVTRLGYGYGFEKMDLKSKHSYQTQSFLWLLGFSWLLIVCFVGFQYHREKELRTELLDSQLQIINAQLEEALSNARTPHDFFDAHSDFFEGLRITLIDLDGTVVYDSEEPPAEMSNHLDRPEVAAALTDGHGYTIRRQSENNGRTYFYSASRIGDRIVRSSLPYTVSLSQVLNADRNFLWFMGSVTLLLCLVGYYVVRQFTKNMVQMEATLAERDREHAAALHEEQEKIRIKRQLTNNINHELKTPVSSIHGYLETLIANPHIDAATQRAFLEKCFTQSERLRQLLQDVSSITRLDEGGQMIDRTEVDLRALIGEVITDTAPESARRGFTVHWTCDRPLTVEGNEGLLYSVFRNLTDNALNYSGGNRIDIALTDETDDRYEFSFSDNGTGVNPEHLPYLFERFYRIDKGRSRRAGGTGLGLAIVRNAILFHGGRIEVANRPEGGLVFRFSIAKKGEAKRMPRFDRIESPAARSGGRGFYLESACGRVLRTVVFGDMSFVMKKLFLVDAYALIFKYYYAFMGRPMRNRAGMNTSVVFGFTKFLRDIQKREHPDLLGVAFDPKGGSFRREIFPEYKANRAETPEDILLSVPYVKRIVEAMCIPVLEVPGYEADDVIGTLAYKGVEAGYDVFMVTPDKDYGQLVCDNCKIYKQKGNDGIEIVGREAIREKYGIENPQLVRDILALWGDASDNIPGVPGIGEKTACKLVQEWGTVENILQNADRIKSRQGEKIAEWGDKLLLAKRLTTICLDVPIDFREEDLTVCAPRIDELKALFAELDFRIFLNDLTNLAPAEPLPEGPRQAAQTQLAEVARAKSAAAKKAALAGQGDLFAPAAEPGESPASDRGSAPSDEQTAESEEFATAQTTPHAYTIVRTVQELEAVLREVAACPEFCFDTETTGFDIFNDRIVGLSLAVRPYEAWYIPFNESNTAEYAALIRPLFADEKIAKIGQNIKFDLMVLGRLGVEIRGRLYDTMILHYLLDPESRHNMDALAMRYLNYRPISITSLIGKGARQLTMDMISLERVAEYAAEDADVTLRLKQVLWPKVEELDLAGLYLEIEEPMIAVLAEIETAGVRIDSEALAEYAVELNKTLNDLEGDIRRLADEPSLNVNSARQLGEVLFGKLRIAEKPKMTKTKQFSTEEEYLQTFAHKYEIVDKILEYRGVKKLLSTYVEALPLLVNPATGKIHTSFNQAVTATGRLSSTNPNLQNIPVRDELGRRIRKAFIPSDDEHLLLSADYSQVELRLMAHLSGDESLIAAFEHGEDVHAATAARLFGKEVAEVDSDERRKAKTANFGIIYGISAFGLSQRLDIPRKEAKEIIEGYFASYPKVKEYMDRVVEEAKRDGYVSTIFGRRRYLNDIASRNAVARGLAERNAVNAPIQGSAADIMKIAMIRVSRRFREEGIRSKVILQVHDELVVDMLRSEQERVIAIVTEAMESAAALRVRLVVDCGVGDNWLEAHMENEKKPTIIRLTKEFTFEAAHALEGYDGLCREIHGHSYRLFVTVKGTPCADESNPKFGMVMDFGELKRIVNEQILSRLDHAFVMRRTAESTRVAEQIGCRFGRIVLVDYQPTCENMLADFAARIEADLPSHVKLHALRLHETATSFAEWMAEDNRMPKATLDAIDGKILQYLVRNARMPFLEIARECGISGAAIHQRIRKLHDSGVILGSRLIVDPKMLGFDVCALIGICVQDPMYMMQTMEKLKEIPEIVECHFITGNFNILVKLYCLDNEHLMKTIFDGILRIQGISTTQTFISLNEAFQRQVSIDFIRAAERMYGKIKEHLEHELAEIKAAGLYKNERIIESPQRAEITVGGRQVLNFCANNYLGLSDNPRLIEAAKKAMDARGYGMSSVRFICGCQDMHKQLEKAIADYFGTEDTILYAACFDANGGVFEPLFTEQDAIISDSLNHASIIDGVRLCKAVRYRYANADMAELEDCLKKAQAQRFRIIVTDGVFSMDGNAAPLDEICKLAEKYDALVMVDECHSAGVLGKTGRGITELYNLRGQVDILTGTLGKAFGGAVGGFTTGRKEIIDMLRQRSRPYLFSNSLPPAVVGASIEMFKMLGESDALHDKLVKNVEHFRKGMMAAGFDIKPTQSAICAVMLYDAKLSQDFAARLQDEGIFVTGFYYPVVPKGQARIRVQVSAGHTTEQLDRCIAAFVKIGKEMNVIKMFHRKQSAGTRQKDKFRHRKAIRRIVSRPRNLKFPGGHDAFTNYFAKFVTLMFKIDSYDFKGKRAIIRVDFNVPLDDKGQVTDDTRIRAAIPTIRKVLDAGGSVILMSHLGRPKKNNDMKYSLGQIVPAIEKLLGKPVIFAGDCMGEKAAETARNLKPGEVMLLENLRFYAEEEGKPRGLAEDASEEEKAAAKKAVKASQKEFVERLASYADCYINDAFGTAHRAHASTALIADKFPHDKMFGYVMENELQAVDRLMLNPRRPFAAIIGGSKVSTKISILENLMEKVDSIVIGGGMSYTFAAAQGGKVGNSLCEPEMFPTALEIVKKAEERGVKLVFSPDALIADKFAEDADTRQAPVNDIPDGWMGLDIGEEGKKTFREHILGCKTILWNGPVGVFEMDKFATGSKAVAEAIAEATSKGAFSLIGGGDSVACINKFGLADKVSYVSTGGGALLEYIEGKELPGVAAIRKMKKILFAATVLCMMGCQNKPTNSTPALDPSNMDTSVAPNESFYQYATGGWQAKNPLKPEHSSYNMFNVLSDNNEIRINELFTQMTKENPAKGTVNQKIADLYKLGLDSVRLNKEGAAPVKAELETILSLDKKEQLTPILSVMQLTSSSPLFSFGPQADLKDSKVNALYIGQSGIGMGDRDYYLDAENESIREAYKTYLNRLFTLAGLEESQVSKATDAVMRIETELAKNMRSNVELRDLQRMYNPMATADLKKNYDAIDWKYLFDFAKINPERVIVCQPEYMEALDKLIEITPIEDLRYYLASQYLNAAAPYLDDNFYAASFDFYGRTMSGKQEPRPRWKRAMAIPNSALGEAVGEMYVEKFFPAEDKARMMTLVENLRTALGQHIDQLDWMSDSTKMRAREKLAAFHVKIGYPDKWKDYSTLEIDPTLSYWENIQRASEWATRDQLAKVGKAVDPEEWLMTPQTVNAYYNPTTNEICFPAAILQPPFFNPAADDAVNYGAIGVVIGHEMTHGFDDQGRQFDKDGNMNNWWTDADAEAFKQKTDILVKQFDAIEVLPARGDQPAVFANGSLCLGENIADQGGLRVAYTALMNTLNGTEPEPIDGLTPAQRFYLSYATVWAQNIRDEEIARLTKLDVHSLGQWRVDATLRNLQDFFDAFNITDGKMYMPVEERVIIWMCRNRNFGTLLFICIRISPMQSFEGEEDRSLLGVNDRVRIPKITQQWAIMTHRLLIGETTRMANSKIGIIITREFNERVRKKSFIVTTILMPVLMIGLMVAPALIMRYSQGETRHISVIDESGVIAPRLESSEEVVYEPTDLTLDEARREHTDRFGILWIGGDIMTNPGNVKLYTNGSSAMLVEESVSGQIADIIEKEKLKDYNIENLSQILYEVKTTVYMQVFRNDQMQDDGSDKQANSSAVSTVVGLVLGMILYMFLMIYGAMVMQSVIEEKNNRVLEVVVSSISPFRLMLGKILGIASVAVVQVLIWGVLVCGVGALVMPHLISAEMMGSVEAMRAGTLDPTAAGVDMEMVQTLATATDFGYVFQIFAYLLLYVIGGYLLYSAMFAAVGSAVDNVQDAQQLQTPIMLPIILSIFVMMVVMKDPNSPLVFWCSMIPFTSPVVMMARIPCGIPTWEIVVSLAVLYATFMAMVWLAAKIYRVGIFMYGKKPTFKELYKWIRYKYMPGLTLSFRSIMEILKVEHVTKRFARHTALDDVSLTIPKGSVYGLLGPNGAGKTTLIRIINRITAPDEGKVIFDGCEIQPQDVYRIGYLPEERGLYKKMKVGEQAVFFARLKGLSRHEAVVRLKKWFVKFGIESWWDRKVDELSKGMAQKVQFIVTVLHEPELLIFDEPFSGFDPINANLLKEEILGLRDKGSTVIFSTHNMSSVEEICDHITLINKSRNILTGRVDEIRRRHGNNIFQVAYRGDAEALRGVLEGRCEVLEQPEPEFGAAYSSLKLHVERDADVREVIARINDAVELRSFTEIIPSMNDIFIRAVGGTLNAEMKFLKMFFAGLLAFVVGSAVMLFLSVVILFGIVGSMTSSEPVTVGEHAILKLDFSEDLIESPSSDPFAGIDFATMTARHQVTLYNALRAIETAKNDPRIQGIYLRPNGGGVATYAILEELREALQDFRQGGKFIIAYNETYGQGGYYLASVADKIYLEPHGGMQWTGVSSTLMFYKGLFDKLDIQAEIFRPTACRYKSAVEPYFLSKMSNANREQMQLLVDSYWNVMAEAVAESRGIELSTLNRLADGLEVSLAQEALDHGMVDGLLFEDQMDDVFREYGAVAKNDGQFEFVTLGQYVSQLNADLKNISSSQIAIVYADGAIVDGEGYGADIYGNTLAAKLAKVRRNDDVKAVVLRVNSPGGSALASDVIWREVELLREKKPVIVSMGSYAASGGYYISCGADAIVADKTTLTGSIGVFGMFLRLEDALKNKLGITFDAVRTNTSADMGVMRPLTGTERAAIMRSVDEVYETFTSYVAEGRNLPLEKVLDIAGGRVWSGTDALALGLVDTNGGLKTAIAIAADKAELGDKFRIVEMTEAPTGFGAFFSGFMAKVKADIVAGELGPWAGEWRKIREAVGQQGVVMYCPYAVQPEMMEERVKELLNRILHPETQHGLVESGFVEQVSTPGDKITVTLNFAKVRDPFALKIKRQVQALLEENFPALKGSITVIIKEAAPKKPQAADKPTMTGDIAHIVAIASGKGGVGKSTVTANLAVALRNRGFRVGILDADIYGPSQPKMFGLEGYLPEAEQVDGQDIILPAETMDMKIMSIGFFVKPSDALLWRGAMAVNALRQMIHQTRWGALDFLLVDLPPGTGDIHLSIISELKIDTAVIVSTPQQIAVADVRRGVEMFRNPQVNIPLAGIVENMAWFTPEELPENRYYLFGKGGARRFAEENGIDLLGEIPIIQSIMEGADTGTPSVSIDARVEPYYREIADRIVDKVVKMLIIRTCRNVETCFEHLSVTFQKTGFDNLPDLIGRTEYGTSKSYAVDNPKYGIIINTINRHYIYFMVDNSSKLKTEIERLKREKNAVILAHYYTLPEVQEVADFLGDSLALSIEAQKTDARIILFAGVHFMAETAKVLSPEKKVLLPNLEAGCSLAESCDAAAFAAFKAKYPGYKVVSYVNTSVGVKALTDVCCTSSNALKVVESIPADQPIIFAPDRNLGSYIQKLTGRENMVIWDGACHVHEEFSLEKILELKRQHPAAQVVVHPECRAYIVQVADFVGSTAAILDYCGKSSAREFIVVTEAGILTEMKRRYPEKTFIPAPPDDEACGCNNCRYMKMITLENIFTTLRDERPEISLDEEVRRRAERSILNMIAIKMKKLILCLAAAVVSLTAAADEGMWLLPYLQKMNIGDMKAKGCQLTAEDIYSVNHGSLKDAIVIFGNGCTGEVVSPEGLVFTNHHCGYGSIQALSSVEHDYLKDGFWAMSNEEELPAPGLTVTFIRRIIDVTPEVLGNIPSIAKGEERSEMEDKNIEALYEKLRAENPGMTINIQPFFGGNQYFAFVMEVYRDIRLVGTPPTSIGKFGGETDNWMWPRHTGDFSIFRIYAGKDNRPAEYSEENVPYKAEEFLKVSLDGYKADDFTMIMGFPGSTERYMTSYEIDEMFQVSGPQRIDIRGARQDILKEDMAASDKVRIQYASKYANSSNYWKNTIGMLRGLKKLDVKALKEAQEAEFQAWAEQNTLPEEGFVDALGMIREAVNDNMAYTGPLQYLSEAMVRSVEIMTPALVANRMLTAEEVSDEAKAQAKEYYANFYKDYNLPTDRKVARKMLSMVKENVKDLPTVFAEVIDAQFGGDIDAYVDYLYDNSVFTDEAKASAATSEQIKNDPAVVLATSVLNKMKELREKAVPNLQKYADGHRLYVAGLMRMQPDKAWYSDANFTIRLTYGQVLPYEPADGVVYDYYTTLKGVTEKEDSSNPEFVVPAKLKELYEAKDFGPYANCKGELPVAFLANCDITGGNSGSPMMNSRGELIGLAFDGNWEAMSGDIAFEPDVQRTIGVDVRYVLFVIDKFAGADWLLDEMTLVKSDCTKACDQKDVKKKETKASKKNAKKADKKRKMQAHVRESKRGERCERSPLFDVEKRSDEIYALRGMKTVLLFGSVCRNKINDYFMTIFRISFVRISEIEMKTKKGKDMTCEEVLEWLAAHANPEFREGMVRFGIDARLAVGVRVVDLRRLAREIGRDHALALELYRRPVHEGRILASMIADPALFRPEEMDAWVAEFRSWDLCDQCCINLFRYTSYAYGKVREYAASDEEFTRRAGFALLATLAVGDKRASDDDFRAFLPLIERGAEDSRVRIGKAVNWALRQIGKRSRGLYPDALALARRLAAKEGAAARRIGRDAVRELTLERIIARIKMQTPLRKGFGKKKAFRSENHRNRCYLWAKDKSIRYDERVMKESKFVRTKIVVGYVLIALIGLTAMIYVWRQTGALLEPDHSQQELRRRRRLVNQTLYHLYEAETYGQMLVAGYASYENRYKRELRLVRECIDSLRMRADDESQQMRLDTIVRLIAGKEQGIKALDRNLRSAGTATLLSENIQRMIPMLDSLSQPTIEPDTILVRDTVRVAPKKKRNFFRRFGDLFSPPKNDSQVVVKTRVRIDAPPRQMSLGDTIAVVLQDLEQRVTSERLALYDKAWREGLRLQRNNQQINQRIYRLIIDFEEEETAYLWERMQAREQVRRSSLVILGSVAAGSLLVMLLFVGILWRDVNRSNRYKRQLEAANRHNEALLEAREKLMLTITHDIKAPLGSIMVYIDLLTRLDLGKRGALYLDHMKSSADHLLELVTDLLDFYKLDSNKVAVNRIAFSPADLFTAVCTGFEPVAAAKGIELRCTLAAELSGQVAGDPSRVRQIAENLLSNAIKFTDRGFVAFDAWLEEGRLLFRVSDTGRGIGPEERERIFQEFVRLPSAGGVSGVGLGLSIVDRLVKLLGGTIELESEPGAGSRFLVAVPVGEAEDDASEKEAAAGMCPGRVCMEGGRPLRCLLVDDDPLQLEMTAVLCRELGIETESCPFPEYAEKLVQESAFDLVFTDIQMPGVDGFEVLRRIRAVRAELPVVAVSARSDDESAYVERGFAAVLRKPFARAELVAVLRRVVPEAGVAPEECLPEEDAVRGFEALTAFARDDAEAAREIIRTFVAENEAHAETLRRAALAGDAVALRAIAHKMVPIYTLLGEEELAAALRRLERSEGSADGALRSAALGVAERVGEIVRAAKKEYLCDRMRPLISAGGVFRQKAVRSHHARTGSCRGSDASVSDDAGEGASPKRSVAGSLCGWLRFFMEKILIIDDDVTFSLMLRTWLGKKGFGVDTAADIAAGRRLLAEGSYDLVLSDMRLPDGDGTDLLQWIAERGVTIPVIVMTGYAEIRNAVVSMKLGARDYVSKPVQPDELLRKIREALDAPHPETAMPASAAMAPAPAKPRRKGDRALDEGELNYIEGHSDASRKLYEYVRLVAPTNMSVLLEGASGTGKEHVARLIHLRSKRAGKPFVAVDCGALSRELAASEFFGHIKGSFTGALSDKKGAFESAQGGTLFLDEVGNLSYEVQIQLLRALQERRIKPVGGLREIPVDVRLICATNEDLEAAIARGSFRADLYHRIDEFVLHMPDLAERREDIMLYADFFLDQANRELDKHVVGFDPEAEKLLVACDWPGNLRQLKNAVTRAVLLTTGEYVTPAELPAELSEAVPAPIALRDPAGEEERIRRALAAAGGNKSQAARLLGIDRKTLYNKLHLYGIEMKKLFIAAAVIVMAGSMASCGQKTQKAAQDTAATEPVATEQVEAVEIEAVTPESEIPAAAESQKTQPEQANNKMKIIIHYFLLFVALVATTGCDKDDNYYPAPEFEGDPTAEYIEANVDFDTQISQENSDPDTFYTYFCLCNASDHKIYFTLTFCPTKNDEFIDHMNGLVDPGKKYTNRFVTSNWSMDVPGLITTFSPLITEMEVYYDVDDKYGPVRFPSGIEEKYSDFTQRFKTRQICDPGQWIYEEFTPRRARWTYILTNEDYERAKIISGKMKRKILSFLAAGMLFTLPAAAQSVGVVMSGGGAKGLYHIGVLQALEESGIPIDYVSGTSMGSIIAGMYAAGYSPEEMRRIVASGVVKQWVSGRIDPSYLPYYRRNTGTPIFLSIRLNMKDHPDDPNASRFRLPSYLISSNQIDLALADLFGPATTASRRDFDSLMVPFLCVASDMNTRRPVVLRKGDMGEAIRSSMSIPLAFKPMKIDTMLLYDGGIYDNFPWEPLDKEFHPDFLIGSKCTSGNNDITENSSLVDQAFSLAMNKTNYDMPEGRSLMINRAVNVSMLDFNSADSIIEAGYRDALARIPALREKIHRTVTPEEIRTKRAAFREKCPPIIFDDYEFEGLTHAQTAYVRDVMRLDDTYDGRQRQMSFPEFRDDFFSVIGNDEFSVEYPEFRYDPLRERYSVKLKMSARENLRFLIGGNISSTAFNQAFIGFDYHTIRRVSQWAFAGIYIGPTYATGSLGGRTDFYLWKPFSLDYSYNFEVLNLRHGNFGNLTPIDNTKSVKNNQGFLSIGLTMPLTHNSLASLRFNGGQQAYRYDAPFPDTDPDTDLTRFSFFGTKLDIARNTLDKILYPRRGSEISLSGIYITGRERYKPAEFGRKRSFNAHREWFGAKFQWNHYFDLPGCKWFSFGFNIDAVWTTHPRFQTETATLMSLPAYQPVVHSQMAFMPDYRAKNFLAGGLMPTFDLLPNFFLRTGFYAMYRDNRGLPGEKMQYITEASFVYHTPIGPVSLSLTKYDLKSWHNMYLTFNFGYAIFAPSGHFYMNDKINELLERVEAFKPKAAAEIEDFRIRMLGKKGELTALMEEFKSVAPELKREFGQKLNNLKNRTQERINALRGQLADAAGDSSQRIPDMSRPGSAEELGSRHPISLVTNQIVEVFSRLGYTVAEGPEIEDDWHVFSALNFPPEHPARDMQDTFFIAKNPDVLLRTHTSSIQVRTMERQKPPIRVICPGRVFRNEAISYRAHCIFHQIEGLYIDEGVSFADLKQSILYFAKEVFGENATIRMRPSYFPFTEPSAEVDVSCNLCGGKGCNVCKGTGWLEIMGCGMVDPNVLEANGIDSKKYSGFAFGMGVERIAMLKYGVKDLRLYFENDIRFLHQFDTVLMKRMLAILVLCTAFSTGFVPQEEALPAPAAEASWPDSLRPTEYYTEGVKKLLIGEDTLAARALFLQALELDSAYAPAWFRLSSVTPDGDPQGTAWARRAYRLDSLNKWYGQLYGQKLLAEGELDKARPLFVRLSALDPTNPDNIRILAILYQQAGMPYSAIDMLDSAEMRFGKMPLLGAMKRQLLIRTGQLDRALAEAREMAEAIPYEAENHVILADLYGAAKQDSLAIAEYNRALEIDSMNVPALASLAEFYNKRNDSHAYLAVSKRLFEIDELPLSEKVRIFRQLTLDVRFYRDNFFQLNDLISTLAIRYPDDKDVVELYAQHLINAGELEQALTLYKLHLADRPPQLDYYRAVIDIETYRKRLDSVYLYIDRALEVFPGNTELYARKGHAQGYTGKLSQSIGSYKKALKYADADSLRGAVWGYIGDAYHQMEEAGRKDSERDKYRRRCFEAYDRSLHYYYDNPMVLNNYAYFISESSRDPRQLDRAFAMAARAVELDGNNATLLDTYAWVLFRLGRLQEARRTMQQAISFDRSENPELYLHYGDILAALGEKFMAETYWRKALEKGYDDPRAIEERIRQLKSKPMRQALNHSYRFPQRAESVRTLCIRLPKVVLFLFLLLGAGSLAAQNTDQQIAAQKRLIADLEKQIAREEQEISKLKKGRASAEETVRRLARQIDSRNQLLDVTERDARKLEVEVARTDSVARGLSASLDAHKRRYAEMVREAYRNYKHNNYLTYLFSSSDFNQVARRITNLREVAAMRERQMEQIVTLSEQVSVERTRLTGQQRALDSVKRSLTTQRTRLQKDSQAARANIKQLSKKEKAALQQKIAREQRLDVAIDELRKLTRGNKEGNTFTAKTSNLRLPVVGGGVKRYKGNMAEIAGPKGAQVISIYEGKVVEVKRNRITNKYDVYIAHGEYISSYANLNSVTVGKDDKVARNQQIGTIGSGVDVTTMQPEYKMVFGIYGPSPKVQMRASDCFKKMAVRYYTDDCTYRLPQKRLTAVWLDRVAREEGYELGDVTYIFCSAARLLEMNRQFLGHDYYTDVITFDYSDRKGARIVSGDIFIDVETVADNAREYGAAKLTEMRRVVVHGLLHLCGQKDKTPRANAQMHRKEDRYLRQWDELSKGLKMKEFATLRPAPSANRLFSTLSRPSRRRERTDRMIYSNDFTGYFRHMNCGKHRRPSIRRPTAARQRYEQSRLSEKAETARNGNFRPTIRRPTAKVGSKTATSRQNVAAAPKRSASTGCPAKNGFSRFRHTPATRAGKSRTLSAFSRKNKLLSGKEPTIHAAHSGRIQTIKGLRTQPTAGSVPARRKRLLRKPNLRSPPLPATDSPRSGPDRQPPQLLPQPPQPALPASKVVRFSPNEGKRDYSVLFGGAATRIPLRRKDLRESRHYRHGLRPRTNERRMTDIEIYDCRGKSIFLREPVPNKRRIRPMVLHYDIIVVGGGHAGCEAASAAARLGSCTLLVTMDMTKLADMSCNPAVGGVAKGQIVREIDALGGQMGRITDLTAVQFRMLNRSKGAAMWSPRAQCDKSRFSAEWRRTLENTPNLYLWQDTAVELLFGQQPAEEGRPQVRGIRTQMGVEFSADCVILTAGTFLAGMMYCGRSHAEGGRAGDSASHGVTESLVAMGFEAGRMKTGTPARLDARTINFEILEPQYGDENPSKFSFSADTHPVQNQLPCFLVYTSKKVHDILRKGFGDSPLFNGTIRGIGPRYCPSIEDKLNTFADKDQHQLFLEPEGRSTNEYYLNGFSSSLPWDIQWEALHAIEGFEDLHIFRPGYAIEYDYFLPTQLHHSLETKLVDGLYFAGQINGTTGYEEAGAQGVMAGINAHRRRMGEEPLVLARDEAYIGVLIDDLVTKGVDEPYRMFTSRAEYRILLRQDNADIRLTPIGYKIGLISQKRYDSFCKKNRLVESLVAFARGLSVKPDEINDCLKSLGCDAISQGRKLHDLLMRNNVTFDLLSGVLPKLGDFLREQEMDAEVVEEAEIQIKYKGYIEREKFIADKLHRLENIRIPADFDFHSMNALTIEARQKLTRIRPATIGQASRIPGVSPADVNVLLVKFGRMHDRHVIDACKTQEKRMFHVEHPFFLLHIFFATTYKQPMENIDWGSLGFNYMKTDFNARYTCTDGKWSEMEITSDEYINMHMSASCLHYGTALFEGLKAFRGADGKVRLFRVEENAKRLQSSAKRLCLPVPTIDMIVKACVEVVKRNERFIPPYGTGASFYLRPVMFGTTAGLGVKPSKDALLVVYGSPVGAYFKGGIKPMKVAIDREQDRAAPRGTGDVKVGGNYAASLMSGEHGHELGYASIMYLDATEHKYIEECGAANFFGIKNNTYITPKSNSVLPSITNKSLRQLAQDLGLKVEERHIPVDELPTFEECGACGTAAVISPIGSIYDMDTKQTYTYGDEVGKVSLQLYTLLQDIQYGRTEDKHNWCTIVMMSKPFKRYLVTSALPYANGPVHIGHLAGVYIPSDIYTRYLRLKGYDVISVCGSDEHGVPITIKARKEGVTPQQIVDRYHQLIKSSFEGLGMSFDIYSRTSSKTHAATASEFFRKLYDEGKFIERTSEQYYDEETQTFLADRYIVGTCPRCGNDRAYGDQCEKCGSTLSPDELINPHSAVSGSVPVKRATKHWYLPLDQYEGFLREWILEGHKEWKTNVYGQCKSWLDGGLQPRAVSRDLDWGIPVPVEGAEGKVLYVWFDAPIGYISATKDLTPDWEKYWKDEETKMVHFIGKDNIVFHCIVFPAMLKAHGGYILPENVPANEFLNLEGEKISTSRNWAVWLHEYLADFPGKEDVLRYVLCANAPETKDNDFTWKDFQARNNNELVAVLGNFVNRALVLTHKYFDGAVPACGALTDYDRETLRELSGAKEALENNIENYRFREALKEAMNIARLGNKYLADTEPWKLIKTDPERVKTILNIALQITANLSIAIEPFMPFSAKKIVGMLQAGPFGWEKLGSTDLLAAGHRIGEAVLLFEKIEDDVIQRQLDKLAATKAANASAEAAQHVEDQKETTTFDDFQKMDIRVSTILAAEKVAKTKKLLKLTVDTGIDKREIVSGIAEYYTPEELVGKQVLVLVNLEPRELKGILSRGMILMAQDASGKLRLLQPDDQTNPGATVGMPIEKRWVVKPQGNPEAVAAMAAATGISPVLANLLVQRGIDTLEKAKKFFNPQLSDLHDPFLMKDMDKAVERVERAVRNREKIMVYGDYDVDGTTAVALVYKFLRQIGHKDLLFYIPDRYTEGYGISTKGIDHAARKGATLIIALDCGIKAIEKVDYAKRKGVDFIICDHHLPAEEIPRAVAVLDPKRADCSYPFDELSGCGVGFKLVQAYCQKNGIPFQQIEPLLDLLAVSIASDIVPLVDENRILAHYGLLRLNASPSKGLLSIIKICGLDRHNITIDDIVFKIGPRINAAGRMRMDENDENAAPSGGYAAVNLLIEGNESLAEEFGSVIDGFNQDRKCIDRSVTQEAHDFIEAHAELKAAKSTVIYNPRWMKGIVGIVASRLIETYYRPTVVLTMSNGFVTGSARSVPGFDLYQAIESCSDLLENFGGHMYAAGLTMRPERVEEFTRRFNAYVEENIDPITLQPQVEIDSELFFSNITPAFRRDLNRFQPFGPGNPAPVFVTRGVVSHGETKLVGADCEHLRMDLMQRQKPNTTIQTIAFQQPTHYEWIRAGHPIDVCYQIVENHYRGSVSVQLRIKDIKPLRSKQMDYKACWEYQQRLFDTLLRAKGTPAEGAGYLLLVEHPAVYTLGKSGHAENLLVGEEYLRSIGAEFYHIDRGGDITFHGPGQIVGYPILDLERIGLSLRDYIDALEGAVIRTVARYGIRAGRIAGASGVWIEGAQPARKICAIGVRASRYVTMHGFALNVATDLRYFTHINPCGFTDRGATSIEKEIGRPVPMEEVKRRLVEDLCENLNVKIYKMYFCINWENNELKMPKLHEEKVNVLKKPEWLKIRLHRTAEYADVQRIVRDHSLHTICSSGLCPNKAECWSRRTATFMILGEICTRNCRFCATLSGRPLPPDPSEPAKLAESVRLMGLRHVVVTSVTRDDLPDGGAAHWAECVRAIRAENPDVTIELLIPDLDAKPDLLDTVIASGPDIIGHNIETTEQLTPLVRSRARYRTSLDVLRYLSEKGAVAKSGLMVGLGESDEEVLQTLRDLHAAGVEIVTLGQYLRPTLEHHPVAAYITPEKFDWYRQQALDMGFSYCASGPMVRSSYLADEALGSVRLKRQVSAKAMAAAPRTEITFPPTEHIAESASGAVPDALSAYSSLPFRHPAPAGPSHRTDRLPCACKGFFHLFRNRKEKRLIFFVFLHQLGKMKETVLVTGGAGYIGSHTAVELIQAGFDVVIADNLSNSDLQAVEGVRRITSAEVPFEQIDCCDLQAMRRLFERHEFRSVIHFAASKAVGESVAEPLKYYRNNLLSFLNVVELMCDFGRPNILFSSSCTVYGEPDAQPVTEQTPRKPATSPYGNTKQISEDILRDAVAAHPGLRGIALRYFNPIGSHPSALIGELPRGVPQNLVPYVTQTAAGIRECLSIFGNDYPTPDGTCIRDYIDIVDLARAHVAALHRLIEERGATPYEVFNVGTGRGVSVLELVRGFERANGLKLNYRFAPRRAGDITAIWADPTLANTLLGWRAERPLEETLRTAWQWQLHLGQRMIALIDKYFPDLTRPQRGQFEALYALYADWNTKINVISRKDFDQLYLRHVLHSLSIAKVCPFAPGARVLDVGCGGGFPSVPLAILFPEAHFTAVDSIGKKIKVVQGVAEGLGLANLTPLCARAETLPERYDYVVSRAVTEMPTFVGWVWDKIDRGQKGALPNGILYLKGGDLADELSRTGMKWTEYPIPAFFDEAFFETKKVVYAAKMEIADYIIADDRVLVELVLQGDNIAFEYLFERYKEAIHRLFIQRTNNPLDADDLLQETFIKVYINIHRYNPAYTFGQWVYTIARNTFVDFIRRRQEDLPIDDKFTAPPSNNPTPEENIIRKQQRTQIERYLQAMPPRYRQLIVMRFFEEYSYEEIAMKLELPLGTVKTQIHRAREQMCRLIAADEKSMEFFNRIIVHYGWEGTALAGVLLVMFGIQLYYYLFVYGRIPKYKDTRRPEILSETPPVSVVIPLFSEDYAFVEEILPLIVAQEYPDFEVVIVYVGRDTDFYDDLVRIKQSFPQITATKIELNPRFPISPKMALNVGIKSAHYEHLLFTTPDVYPSSDRWLSLMANGFRRGEIVLGYCGMERGKGFASYLIRTWRMMHSVDWISSAVCGRPYRGMRQNYGFTKRLYFGANGFSHLNMNIGEDDLFMSRIIAPGNVSVVLSPRATLREKSWGGLKWWIGTQRFFGGAIPFYPLWVKNFIQWELGSRILFWLAAIVALAVMPWEFKIAAGVLLLARFAIVLVEARRISRRLGEEKICGRYFLYDLLSPFFALLLGLLLLRKDERVWRMNESYDTQTVNPSIEKYVSASNNGIETHKFTRCVIGYILNGEKYVYYDDKCYKFSQGDLFFLGMGCHYTKNIPAQGHPYEQILVRYTSEELQRILLHLNIAYKLNITNNHQCDDCRTLNHATMPGWSSIRRFFNHTNDYLTEDSFLHDPPAENIKITELIYLIVSHGDCCIKSKLLGNVDAARDNLQQTVYASIFSDISVEEIAKRCNRSLTSFKKEFFRIYGTSPHQWLIRQRLIHARLLLISTDKAIAEIGTACAFPNTSHFIKLFRKQYGMTPATYRARHRGVEDLQTTPETESTAREPLLTATPMKPDIIRQPLLLAIASILVVIAAAMTTGTTISPAPETMISTPLGDLIGLFQERFPRCSRILCGGLLLLTGILCGRLAVRYGLYPVSSTLTIPLYGLVACGILLGREYLTESVAAFVLLLSTQNFFACFRNGYAIGAVFRASFFLGLLPLLYAPLLPLPLLVLAAAFCFRRTLREVFVSLCSVVLPFLAVCYIAWGQGANPLDTPAGLWHSFVSDSGYRIFANTPPLVPALLGIVLFIVLCAIFFGLISFRTVSIKARGMLTYTILLFTVTGCLIAVPSVTPGLLAVAAVPAALLMPLTFIRIQRTVGTLLYLILYITCIVNILQMPPSKTDKPAPISAKTREPGVCAETLRTSPKYRTHFRKIKNIGNHIQFYTDVSITPDLPEPPRNSSEKQEAGFSTEPMLENCYQKELPEAGCDEAGRGCLAGPVFAAAVMLPPDFSHPLLNDSKQMTARQRDLLRAIVEREALAWVVKAVSAERIDQINILNASFEGMSLAVAELPIRPGFLAIDGNRFRTTLDIPYRCIVKGDGKYADIAAASVLAKTHRDEYMERLAGDFPEYGWERNKGYPTREHRLAIRRYGLTPHHRLTFNAGIDQLELFMEMKRYQKEENFSPEKIAKLREHYKAILELLGEDPAREGLLKTPERVAKAMSFLTQGYEDDPLAIIRSATFKEEYRQMVLVKDIELYSLCEHHMLPFYGKAHVAYIPNGYITGLSKIARMVESFARRLQVQERLTVQIRDCIQEALNPMGVAVVIEASHMCMQMRGVEKQGSATTTSAFTGVFLSHPPTRQEFMTLISNKYRMKIIFATNNAHKLSEVQAVLGPDFELVTPRSVGITEEIPEQQDTIAGNASQKARYVHDRTGCDCFADDTGLEVEALGGAPGVHSARYATDGHDFAANNELLLRNLEGVGNRRARFRTVISLILDGEEHLFEGIVEGHIAQCASGSEGFGYDPLFIPEGSAKTYAEMDPAEKNALSHRGRAVRKLAEFLHNRGKMKEPLTIALIYDFDGTLAPGNMQEYDFIPAVGKSNKEFWHDANQLAEEQDADMVLTYMARMIQEARSKGLSLRREAFQESGRRVTLYKGVREWFARINAYGAARGIRILHYINSSGLKEIIEGTEIAHEFRRIYACSFLYDIDGVAYWPAVAVNYTNKTQFIFKINKGVESVFDSKLVNQYIEEDKRPVPFRRMIYVGDGTTDIPCMRLVKNSGGHSIAVYNPEIRNARRELNGLIRDNRVSHVCPADYSEGSEMDTLVKTIIDKIEADHRLELLETPRTMEFKEILRRRRSVRKYLSRPVEREVLDTVLREALAAPSSRNSHSTHLRVVTDPETIARIARMRDYGSAFLEHAPAVVLVEGDRTATDLWRENAAITATALLFAATDAGLASCWVHVNGRPCLKDQPDGAQAEDYLREFLPVPAEHGILCAVALGYSDFEPAALPPFDAGTHIHWPEKMKYLIVGLGNIGAEYADTRHNIGFDVLDALAEASNTSFTTDRYGAVATLRSKGHTLVLLKPSTYMNLSGKAVRYWLDAEKIPRENLLVVVDDIALPFGTFRMRTKGSAGGHNGLKNITELLGTEEYSRIRFGIGGDFPRGHQVDYVLGHWNDEERKAMPERLKYFGDAILSFAAIGPERTMNLFNKKMKTIQVKAVKRENYGKKAAKAVRREGQIPAVLYGGGETVSFSVDPREIKPLIYTPNSYIVDLEIDGKTEKAVLRDVQFHPIREEILHMDFYRVQPGKPVAISIPVRLTGNAEGVKIGGKLVLSARKLTVSAQLDKLPDELVIDVTPLGVGKTIFVGDLNFDGVKFLTPATTAVCAVRVTRASRGADAAAAKMTTLVTPREVIDLAFADGGYLPPEAIGTVDIAAAEARYLLPVTGPALWQKLAEGEYPTLREEFAAPAAACAVRVAMQPALDLHGGAGGTTVTKSSACQPAGQQQLAASHRALRNRLSALLHALSDHLDAHPSDYPEYAPEKNVLHRVLIAGGLVLKPMNTKQKLKKTALVKAVRRDDPYLTLGAARVESDKFWRWGDDNLFPAALALMSRRSTTHRRIINDKADYISGKGFTFDPEVPLLGAFVAQVNGSGESLRQVCSKLSFDKSLFGNAFLEVVTDEKHSFLALYHQDASRCRVAKDSRHILLHHDWSRFSAADARTLPLYPLFERQDDGTLRAIVHYKDYEPMFEHYGVPPYIAGFGVSAIAYKTDRWNISRLDNSFQLSGVMMLDSTMDDEAQAERIMRTAEEKFAGNPGQVMFVLREGAAEDHSRFIPIASQNEGDWRSLHEQATSDIVVAHSWFRTLSGLDYASGFSAERILHEYEIALNTVILGEQAELLEPIREIIGRILGADPSSLEIVNRPPTRSKPLYMKVWEARKADGLDYDPEDERQQHFLAEITKYNLRSIDMSGTTPYARPLKPAGGIEAVWLIPASDIVSATYGDGCCTGLTLRAGASADQWLILEQSSSFREENLNPDGPPRFRHTLTLVADPEEIRDRLGERQLARLATEGTVARIETASGVFLLAGRSEKFGAEQPLRLTEIRYESQTKFAARPVLVLTLAGEDTAPAPPIREQMSALENAKTYTGKNLETIFFRPMLSGPSAIDLGVRVLYNMPVPTTVQMWEPKTDILQKFTAAGWSGGAGSKKLQKTIPLNRVKAELGYSAADYFSLVYELITNRPEVNMEDLTGTELEEAETTLFKQAIAESIRSTMWVGDTSAESGANTFDGFLKTIATYSNNNKVYTYNYETDAMNTPANSVAMFDDLWKNADERLKDLKAEGQLAFFVSSDVYSAYEKHLDSMSTDGAYTDYINGRQNLLYHGIPVVDLRISSYLAKLSSSSPVPKSFCILTDRRNLVLAVNTADFPGNEIRMWYNPDEMENRQRAVFMAGCDVLDEGLVAFASRIMQSDIQITNRNDTCFVDIEGVIGVPEEWQFDQPSSRVATYEKFRDSLDRLREIDAPEIVVNIRSTGGDVNDALLIYEALSSLDGHIVTRCYGYTASAATVIAQAASEGCREISAHALYLIHNSICTAEGNAEELATRIDLLRKTDARLAEVYAARSGRTPEEFTLLMAENNGSGRWLSPQEALAAGLVDRIIEPAATEKTPAAQATPAGQWRKLLGKLGLVRPADALPPDRNILHFGDPEKGSGPRTSELALHEGQQFAAPTRTLPREDPSIGETTPSANQRAYAEDAKQLIRMHGKLFFAGSLAGVRNGVGCGRDRCGFAASPLRQEGWADFRGVHPVRVRGVVRLRSARMKDGRRAIRWADGMKLTIDQIPCDLDPSQRIALDYDAQDLADVRSGNKGHALRLRLPATRTNDRIFGFAAEPYTGQRFNAAQHTAVLSDGEAKLLQGSVRLLSAAYDSDPEGYLIEIRSGTSEWARQAAAEMFNTLGISFSGRLTPTMIRQTWTNNTPVKFFPVCRDEYTPELSSVELIPVERFLSVDDYHPFISAATVVQTLFSEAGYTLESDFLNGEFFRSLYLSGAYSSRDTNALRNHMDFLARRTTTAATTANSDGRVYANPYKSINSVGNFVETVNPNDQNDLGETLTDVFSNNHCFTVEDGEIVFRPMTSVTVAFEYHIRYITDHRILDRNRLKGIDSFYLGDGTEVQGALANRYADRRNSTKPAFQYRAIVFNHTEGNSYRLTCTVNGTAGHAIGEFDSRSALVTTPSGSTVTAPVLLCKAAGSTTYTTYTGDWALYDGYIGETGQTEVEMTVRTNPVTVTPTSPKTFSTIYFYGAEPGMKFSLSRQCTLRPDFTGAPGLNTPISFEDVARHRVRKWVVLDALRHLFNLRFYTDEETRTVYVEPADDFYRLGQTFDWSSRIDRSQPILLGDAAQDAERVRIYKYREADGAVTRLNATLEEPFGQWRLVNDSAAAIDRERNLANPFFSPTVSETECYADAPSALVLRVGDRDAPDTTDRNSFTPRIVRYCGMQPLPAGERWGYPSTGDSYPLAAFHRNDPDNGFTLCFEDRDGQQGLHRFYDTQAEQEKLCQHLTLHLRLEPCDIERLFQIQRLAPCIASTFLFRIGGEEIRCTLRRIEGYDPSAASTRCTFTRLPNGMTFTSLPEMFSSVFGPLAYTFSNAAETELFLEILSTRDGSRIGSKRFYNTPTGTLNIAPMVRKNIRFVPSSGMTGFCNSESRSASVQLAVGTTYSEVRTFVAAHDSVKPSRILTTMPSHRIIAYGESDEITCCIPGQHTVTVTSDITAEALTYNAIGGEELTLFRLNTRSFLPSVGTITVRIATAGQTVAEIGYTVVPKCDEGCRIAWRSRAGSIEHYTFPVVKSVVQKIRKEQVLTDDAGYEDISIRDERTTTLASAFEPAAVIEALAEIAASPQVWKIDGDKYEEVDILTREQTIGRHGSLGCIEISLRPRQETRCLMNRTYLTRAIRELAGVYGYTIHTDTDDRTPREIVLLPAAWLPPIRLKEVEGRLHGRATYSVELRLLHPGAKLSSERRNEVWSQTELQLFDLFTQLSTDPKVIAVENLTVQPGSGAYTPHGEISQTAKADVIICFMFIFVPTNPLFNRRPQDISDLFNNRNNSVVRKLSRLFNICKHFIKTFSTMMVSVPSIAAVSYLNTIPFIYGIRHEGNFRADLLLSPPSECTKNYVEGRADLALLPAAAVPSLKSTDVITEYCIGAVGPVRTVVLLSDGPVSEVRRVFLDPHSQTSVQLVGYLAAHRWKIAPEWYSLDDYEQLRHAQEGDAFLLIGDKVFDHEEKFRYKYDLAAEWQAATKLPFAFAVWVARKGTPYEVIESLQHALTFGLEHTYEAILEAGFDKKPYDAYEYLTRNIDYIFDNQKRRALQKFWDSGLKVSPRVNPGMITIYLKQYNKIIRNADTGLFEELGYDDILWIDMLQPTIKEQKAVENFMEINLQTKQQVEEIESTSKYSETENAIISNANFFVPTGESFVIEPVSFIISNEGVLVSVRQAESRTFQETEKRLQINYRNYPTGYHIFITLLEVRIDYDADMVELIARQVSSLSRNINGEDSIDKEVLRRINTLQESTMLLRENIFDRQRVLSGILRSERFPNDIYPRLQLMIKDVNSLINHADFSFQRLDYIQDAALGLINIEQNEIVKIFSVAAVVFMPATLIASIYGMNFSIMPELHWKYGYLFAIGLMLLCSGLTIWFFRFKKWLMVIKTVRFDFGFIFVGRGVFYLFRKSFPKPGRNKVRIMKKLLIYIFLSSLVGCNEPEEWIGNGSGYSKYLVQNYVDGSYVLYGMLAEKPSTLYSMSGFQVLLEDPVYYQTPEQEGAQHTDDFLRIAERNHDTEYNNLKSLPWSDLTAFADNFTGIKVTSDKDWSAKYPAGSPLNDKMGVRYVSYAEYIENDYHSYSDLGKEILFLYNKPLSALQPDDLRVVEYTLSSLSIYSFILYFTSVPDNPGEVHTFTVEFTTSDGTVKTASITCTPEVDPALQMKYLSLLAILGLLVGCTSDLTTEEVPQPPSVPEQKISHVVPVEQALEDLQGLLEAIDAPAEDGAVTRSGGIRRVKNVTTVSPEALSPGGTRSEATADVEDLLYIVNFENEAGYAILGADDRLEPVYAVVDEGSLTTEEFRYAVTVTPEQAEADGELVFPLQMVAQAAIGGVDTGGGGNGIVGGPITDIEHWWPEGQQPVGIDYEPWETKEQSGILLKTRWNQTKPYNYLCPIENGKNCFAGCVPVAVAQILVFNALNYNKKFYQIGDQLLNEAMWLNIEEAVTHPQLVKPVVSGESMNAQTWAVAYFINKMGEAVGVKYHSDDGGSPAPTKNVVKLLQYLGDIGLGYSNIALSPITTDKVRDMIFVKKLPFYYSGKSSTNSHAWVLDGWLLRERRVITRYAFLPTQYHTESKEFVHANFGWGGQKDGYYTFNAFYTDRGPVSPQSIEDRDYDHDFSAVTYNLSKNFGWGGTANGYYYYGAFDLRNGPEAGRCGGREGWMITICTDDNRDRYLVRGNKLYPIMKDGINELPLVKISKKQAKIELQDYPFYYNVKDMRKITDKLRRINPFARKNDGPLPRPLPGDPSLRVVKVFVEGYEDVAFWRGVFDCFANPYLYFEISVPTRKDLPKGKKVLMSMIPESSERMLLCVDSDFDFLFNGATEQSRLIRDSRYMFHTYTYATENYLCYAPSLHNVCVKATKNDTRIFDFERFMADYSRTIYRLFLWYAYSAKLSDEHVFTLVDFKSSVRLNYLDLEDNGARTIAWLQRNVARREQTLASKHPKQAAELDDFAAQLGRLGVTPETTYLYMHGHTLMDNVVMVLLETVCEKLRQMTAARITASKKEGVALKNEMSNYTNTQRSIRDVLLDNENYQDCPLFKRLYRDIERYMVRTIWRMKQQGEVPASETIFSIVRGFRRRMSFYKGSKNEGRINKLVCFILSKFSIPLYPTVAASNPQDAYSRPGPCLMIYKIREIAKERPDAMTITSSRLYVIDSMKSKHIFRTMSEQALCACPIDFVGLDERDLKRKERLKGVIVIVERVEIGDDLVVSMKATQFFEWLFYCWFYEKVFFEKRICGGMNVMALVLRRMMKKPRRNRAIAPTRLLQKNKTRAKKPYRYERIPARVQMFMLFLEDKVCRILGYLFMAGAVGRSGRFDELLPGYLCSGTFGAYRILMQTVSRSLLGVFRESVVKRLKLSGQVVIPLRFVVFRKEFCLFREKLVSSFRLMSITKFKGQPVQIAGEFVKAGAAAPDFELVKTDLSTLSLKDLRGKQVILNIFPSLDTGVCAASVRKFNKLAAELPGTVVLAVSKDLPFAHARFCTVEGIENVVPVSDFRKTSFDESYGVLMTDGPLKGLLARSVVVIDGDGKVVYTELVPEITQEPDYDKALAAVKRMQKQIYLHFAEAKYLRRSQNTKKPGQTQPESDFIQAKSKIVKGERKRELGPCFPRRILSKTMSKIGKGERNRAGLHAEIAEPHPIFCKDTDKRGQSGPIRILPNESILGFVQDANEPNAKANKFVFCRNKISTTKLKIRKAASPYGNKRRRPATMEIVYHIKPFAELSVGELHAAASLRERVFYLEQHVTTLDADEKDPFSFFLWAECEGQTVGFLRMIPRGIAYAEPSIGRVCVARTYRRRGICRQMVSRAIGYMVREWRAEAIRISAQSYLIPFYESFGFEVVSDEYLEAGIPHKKMLIRLDREHGREAMEEFIASLTQFFTDWGYVGLFLSAFVAGSILPFSSEVVLVILVRMGLDPLLCLFAAASGNTLGGMTCYWIGHLGKRDWITRYLRVEPAKIDRVSRFLEGKGALFAFFTFLPYVGEAVAIVLGLMRSNVWITAVAMFVGKLLRYVAIVAALQGVLSWFMNQRIQKQNIREKYWRYSLYVILLGLGTVIFVELIPFLGGLLGALTIYVLLRGQMRALTIRHKLRRSLAASLLIGEAIVCFLIPLSLLVWLLVAKLQDVTLDPSTVIQPIRNLAELIRERIGYNLLDGDNIAKLVELLPRAGQWVLQSIGSFAVNVVVLLFVLYFMLIGGREMESYLRKFIPFNRTVTQEFTREVVMIVRSNAIGIPLLAVIQGAVALVGYWLCGVPWALFWGVVTCVATIVPLLGTALVWLPLAAYLGLIGHWGAAVGLLAYGVVVITQVDNLARFVLQKRMADTHPLVTIFGVIIGLSLFGFMGVIFGPVLLSIFIFCADLFKRRYLDEAPMNEVLASPAERSSESGREMQVPPQTDHLPCLTAPDIGLGKQKVRCKTGKHHLPGRNFPPAVPTSAHGEAEGRRFHNVPAVLLPGSILAINITLPATFAHTLTPVPRIPRYGHMNHTSVSSKTRIPGQILIRTTSVCNSPAPNRPAAANDRSRNNNNPKNRGFVTRLFPPRPLTRIAANRVSCHSPKKIGPTTSVPPSPMFFTKRIDRLSECLPGDWGAGYEHVTIGCTVENQRMADYRLPIFQKLPIRHKIIVCAPLIGPIDLAPYLGPEIEQVSVGGESGPEARVCDYAWVLSLRDQCAEHDVSFCFHQTGARLLKDGRLYRIRRQFQHTQARKAGIDFKAGGMKKIVVLFVSMLVLATTASAGNDKPIQVSQLPQTAQQFIKKYFGDRKVAFAKEESDFRKSYEIAFKNGDKIEFDRKGEWTDIDCKYSAVPTGIIPAPIAKYVADNYPDNKIVQIERDTRSTEVKLDNRMEIKFDKQHRVIEMDFMISKKLQDALNAQINAEMWSAYLYLSMSVEAESKGLKGFGNWFFIQFREEQDHARILMNYLLARGGQVLLAPIAEVRTSWGSQLEAFEDTLAHEKKVTAMINNLYDMAVTEKDHATASMLKWFIDEQVEEEESATTIIDSLKLVSGDKMGVFMLDKELATRTYTQAAPLAGKEMQGKAIDEATTKPESGTLRPKKRNVSLDIFDERQLRKSSRKITEKQEIMKKITAAITGVGAYLPDYLLTNDELSRMVDTSDEWIMTRIGIKTRHILKGEGLGTSYMGARAIKDLLEKTGVNPLEIDIVICATVTPDMFFPSTGNLIADQAGCKNAFAYDISAACSGFLFALTTGSQFIETGYAKKVIVVGADKMSSIVDYKDRNTCPIFGDGAAAVLLEPNKEGYGVIDAILHSDGSGEQHLYMKAGGSRYPASEETVRNNWHTITQDGPAVFKAAVSNMANVSEEMMQRHHLTAQDIRYLVPHQANLRIIDATAKRMGLGREKCMINIDRNGNTTAATIPLCLYEYEAALCKGDNLILASFGGGYTWGSIYVKWAYDGENCMLKIGVDAMGGDFAPEAAVKGAVMAVDAIGDECRIVLFGDEDRIRAVLKAENCAADRFDIVHTTEVIEMGDHPAKAFQQKTNSSIVVGFGYLAKGLINGFASAGSTGAMMVGSMQAVKPIEGVIRPTISTVAPTVTGGKVLLLDVGLNVDCKPEVLAQYGIIGSIYAQAMLGIRNPRVAVLNIGEEETKGNAQSKAAYELMKESEEFNFVGNVEGSHLFSGQVADVIVCDGFVGNTLLKTVEGLFRINKALKIPETPFWRDMNYEYVGGTPVLGVNAPVVIGHGCSSALAIKNMILTTERCAQTGVTAKLQNAFKNMAHPKHKISSTRRDKRRTHYKAVVPTVVTCSNCGASVLYHRVCPECGFYRGKLAIEKKAAEMNAARKYSIAWKGLSEGEHTFDFEAGDDLFRLFENTEIKGGHCDVKVNLLRAARQLRLEISIRGSVVVECDRCLGDCSVPIDYEGELLVKFSDEVREYDGDTLWLSPSEDFVDLTQYIYESIVLSLPYQRVHPDGECDPDMLGRFRIVSEQEFETIENETQQREREASGSGQWTEQLSAIKQQMEQEEKDKKHMKSVEKFTVEIRSGFDQWWRYNAALMCGAFDASGNRIGFASAESRVAEMGSNLEAPPEGLDLHRSLTLETVPCERIVLYIYVIPHTLPRDNEIGGHPPFPLQVRIRYGDRTVLDKEYSINQWGGASIELKVSRPMSKIKVGINGFGRIGRLVFRAACTHADTIEVVGINDLIPVDYMAYMLKYDSVHGRFDGTVEVKGDKLVVNGHEIRVTAEKDPANLKWNEVGAEYIVESTGLFLTREKSEAHLKAGAKYVVMSAPSKDDTPMFVCGVNADTYAGQDIVSNASCTTNCLAPLAKVINDKFGIIEGLMTTVHATTATQKTVDGPSMKDWRGGRASIGNIIPSSTGAAKAVGKVIPALAGKLTGMSFRVPTLDVSVVDLTVRLEKAATYDEVKAAVKHASENELKGILGYTEDDVVSTDFTSDPRTSIFDAKAGIALNDRFMKLVSWYDNEWGYSNKIIMLIGKMAAYNNKMIKADHISKSFDGRVVLDDVSVEFDTGTTNLVIGKSGSGKTVLLKCLVGLHEVDSGSIWYDDIDFTALGFKERKAIRRDIGMLFQGGALLDSSTVEENVKLPLDLFTEQSEKEKMERVNFCLQRVRLNGANHLYPAELSGGMIKRAAIARAIVLNPKYLFCDEPNSGLDPQTSIVIDNLIHEITQEYGITTIINTHDMNSVMEIGEKIVYIHEGRKWWEGTKEEILHARNRELNDFVFASAMAKRAKQMTPDGEMLKIFELIGRYFILMGKVFSRPEKRAIYRRRIIYEMESLGLNSIGLTAIISVFIGAVITLQMSINLESPFIPKYIIGYATRETMILEFSSTVVALILAGKVGSSIASEIGTMRITEQIDALEIMGVNSASYLILPKIVATVLFFPFLAILSILIGIAGGYLISALTGIMIPDDYVQGLLYDFRPYSITYTLIKMAVFAFIITSISAFYGYYAKGNSLEVGAASTKAVVASSIVIMIFNLILTQILLIMNLLIAIIDGIVGFIRRNPLFCLLIFLLALFAPSVLGGIAMFVLYALLGLVVLAIILLLSFRWRIYRMRKDLEDQFGGQGFGPGGSGGPAGNAREGEIHIRKTKGAGEKRVRKDVGDYIEFEEVPATETDKNDPDKQMLLNKLTAISPVDGRYRNQTEKLADYFSEYALIRYRIRVEVEYFIALCELPLPELSGVEKSKFEALRALYLDFSEADALRVKEIEATTNHDVKAIEYILKEKMEALGLSAYKEFVHFGLTSQDINNTSIPLTIKDALAEVYFPAAAEVLDRLREMAREWHDVPMLARTHGQPASPTRLGKEMLVFVERLEKQLAQLRTLPVPAKFGGATGNFNAHHVAYPAVDWVAFANGFVNDRLGLERSQYTTQIEHYDNLAAIFDNLKRIDTVLIDLCRDMWMYISMEYFKQRIKAGEVGSSAMPHKVNPIDFENAEGNFGIANAIYEHLASKLPLSRLQRDLTDSTVLRNVGVPMAHSLIGLRSLLKGLNKLLLNREALDRDLENNWAVVAEGIQTVLRRAGYPSPYEALKALTRTNAHITRESIAEFIESLDVAESVKQELRAITPQSYTGVFEMRTVLRFLFPAKSCSAKASGILLASRMIFGGLLFSHGIAKWSNFDTMSTMFPDPLGIGSSASLSLAIFGEVICSLGFIVGAFYRLALIPMIFTMCIAFFVIHGADPFAVKELALVYLAIFVLMYIAGPGNYSVDRLIAKKIGGGKMKKLYFFCIALVALMLASCGGKDYREMLPADSFVIVSINPESLSRKAQVGDFTQSVYYKMAEQALADAPEEERGRILSLLAHPSETGLDVGSDVFMFVTMENASQTGNPTVGGLFKVGDRKKLDSFLGWLSQKSGFTSFEEDGITFLANTQGADMPVVAYDETALLVYTAPVDNDQAKAAAKKLFAQKKTESLMGNSQLAQAIERPSDMKFVMDYGSVMAVAGEQIGTAGLSGFEFLNKMSMAMPVDFEKGKIVAEARILFSDKEAEKQYMEMVAAQRKMDGDFLKMLPAENVATLAGSMDGTRTYEMLQKIPMYSMVFAMAPQVKPIMEAIDGDIALSFHGMTDNGRMPELSLIAELKDPAIMETIKGMIPVPMQEMAPGQYALSPDANTTIYFGLNDNTFYATTDSDALVFLTGAQTSAYEAEVGKLFRGSYGTMFVDFPAVRSLIESLIAQNRLDQSAAASLMALSLFDTLEITGRTERQGELVLNMTDKDKNAAEVLYKTIEGFAQMFAATMFMGSTKLDRTRRPRRTKYQNIASHSRRYSGKNPLIRKTTVRTLPTMDKIGLRQVLPDVFADNPPVGSEIWRRDVTFDKGRVYLVEAASGSGKSSFCGYLYGYRRDYSGTILFDDRDIRGLSVGEWSGLRCRSLAMMFQGLRLFPELSAVDNVRLKNNLTGRRSEAEIAWLFEALGIAEKRETSVSKLSFGQQQRVAFIRMLCQPADFMLLDEPMSHLDERNAAVMAGILLEEVRTNGTGVIVTSVGKRFEIEYDKVFSLMKLIWQLLRQHVSVLQLAGFLVTNLVGVAIVLTAVQLYRDVTPALQVPDSFLDNDFIILTKEVEGAGIGKTSFTQTELAELAEQPFTEALGEFTPARYSVMGGISLAGIGMRTYLFFESVPDRFLDVRSDEWGFEEGSEFVPIILPRNYLNLYNFGFASTRGLPQVSEDLVRGITLDLDLSGRGQFRNLKGRVVAFSNRLNTILVPEEFIRWSNRRFADKPAADPSRIILEVRNAADDRIHEYLALHRYQIEGGAGDEGRASYFLRMATGVVVGVGLLITVLSFFILLLSIFLMLQKNLKKLEDLLMLGYTPAQVARPYQLLALGLNVSVLACAVPVVVWVRSKYLPMVRMLGEDYAVPGIWGMLLAGIVVVGAVVLIDMLVIRHKVNGLWTQRMLGCYFLSVLRKESLEIIIFLKMLLLCILAGRWNLPIVFKLRVFHSLFIIGPLWKSVNSNSIYFMLIVNCGSNKLAALDLSGLEKLTSLGCYNNNLTTLDTSKLPEMSFLECYANSLTTLDLTTNSKIATLHCQNNLLKTLKIETCQNLTSINCSQNSLEGELDLSSRTELRKIDCGNTFLTKLNLTDCTKIETLNCNNANFSELDVTGQPAMTELNCRDNTLTTLDVSNNLNLETLYCQGNPLTKLWLAEGQSISTLVIDNPDAIDYKMKKLFFHLLTFVCAGFTLLLAPGCNDDEGEKTGPTGDEGKEIYSLSVTPDKLEFQSTKQTVEVTVTTNGPYWEYTDNISWLEIERTETGFSATAKAYSGNETRTGTLTVYVISESGDIAARQDIPVSQASPSETPEGMVVFDDSTFKNFMLSYYDQDYDGAISPEEALRVTELYLGFDEEDEEAVPITSLKGIEYCKNLINLECDFNAITSLDLSGLDKLEYVDCSYNLIKTANLSGCISLKQLYANVNEIGALNLKECANLQLVQAYKNKLTACDVSGMSKLVYLDVSQNMARPMVASSVTPALSFKNLLGSLRLNISGDNGTKITKIVLTATSGSNLTGKFSVDLAYEDTPMIEWTSEASSTLTVDLGSQGIELKEAGTPVDVLLPAASYGGFAVTIYDTKNGVMLNEKLPAIDIPSGETVSTDVTYEPGTEQVVYLKAKVEKAADGSDFIWNSGSSIYVNGEPIILYRGEGTADGEFGPCLQADSYYASTSNASIDGISGTQMRVNIPAKQEYGASLTTLNPAAATSTSTDLNFRYVAGVVKLTVSGPHAVRTIELQGKNNRRLAGDGMINMTASDFALSLNADASKSITVNCGKSGVSIESGHDFSFVLPAGDYSEGFDLILTDNIGLVSTFELPGTTVNRNEIASLGEIEWPGGQGGENDLSAYGVANCYMVHTAGTYSFRTRRIDNTPIQNIAKADWLWVSRVGASENNELISDISYADGMISFTATANRGNALIAAFDDKGEIVWSWHIWMTDLPETFDYENNPIYQSGGKTDGFYVMDRNLGATDTKGQESYGLLYQWGRKDPFIGGKANETVAFENSSELTVCNPTYSQAKWVAAECTTEIGSVKHAICQPMLFIYGDQVNSQANWLDPANTEEDWKYVTDKSLWRPFSKSNYDPCPPGYQTPRKGVFSKVQNRADRFPNEGVRYTTDAGEETWFPFQGHRSAHPSDKGALRYVAEEDGLVNIWSSELSVNQRAWVFFVSWPLLDNESTDDSWGYGNPVRCVKTYNMKLNFILNIFKLEKVISVRDFITNIDFFEKILIFSKKILKLQEIKTIRRKSQSEPEMMKITDLSKCKNFYCPPEVQFIELRIERGFAESSYSATETWPGENLETDDYGEFMKKYRFIICGLVVWGLCSLSSSCTKDSSTEPPFSGKTVTLTVTAEKETTRTYVDENNKIHWSETGERIGVFYAKESDAGVLRYATTADDYTVKDNGAAVFSLMADSEYAGYFWAFYPGMETSAGITLTEVPLVIPAQQTPTETSFDPQADLLISKYVVTAVDNTVNFSFHRVVAFAKMRLQGVAPGEKISSITLVAPGTKLAGSCTANLLNGSVNYAPADDSAAETLTLAMNGREASGEDLVWFSVMPADLSGKKLTVEVVTETNIYRKEIDFTNKTLKFEAARVSEFIISGLTPVKRDVYKLMTRTSELKFGDKIVIGRNNFSGETRLMSKNKFSTSLEPRWYASTDELVVVDESLQIMDLSSDTQIITLKEGYDRTTFSMETAEGYLNAGVNTEDELMMDVQSDVTKAASWTISCDGGIARIYSADKTTRALSGSSSTSYFNLTTSPGNVYIYYCSMGGSSAPLTALPTPTGLSATASGKTVTVAWNPVDGAASYDVTCGTEVKQGVLEATVEFEMAEYAVQYNVSVIANPADPETNTSSLAATTTVSTEADPNAGQVANTALFDFATMAASPEKPDSPDGVMTEDGCLMILTRGSWQSEGLGVFLGSGKTISIEGQNGKQITQIVMTPGTGKDIKIGSWSTDLYEGIYDESSYTWKQGEGPARYVEFETSAASTIARIEVTYEMVTNGNLEFDGEKCIVLERQISIDNLRTSKAWYSYKTQLSLKMPKTLSKYDFTGQNHPENGVKAILITDTFIPLFSTVIYILFETKRLSSMKLSATMSMKSNSKIHMYYTEGSQRARDYVGFNKQLVALPGCDKGVERGSASVEMITRIIPHRKISLCSLLLALLAPVLLTAGCNDTQENEGARDPTTPLPEPKPKPKTYPLVITDIRNLPPKTTFDRIAVQITGVDWSIIATVEAPYMERAKYQTVKNKMERTKAVFNWSGGKDSAHALWHAIESQHYEIVALLTTVNHDTRRSTMHGIPFPLLQAQAASIGIPLHAVDLTPKGDMEDYQTAMSQAVAHFKAQGVTHFIFGDIFLHDVRKYREQQLAPHGIEVVEPLWGRSSETVMHDFLASGLQTVVVTTMADGLGAAAIGRTIDSDFIASLPAGTDPNGENGEYHTFCYDGPIFRTPVRFRLGSPFSRSYDIRLDDGTEKTYTYWFADLQEPMKYCFVPFSYKFSAEGRRFALSVWLWYGLICDFFCVPDKKVRATIFMAKEKFDRSKPHVNIGTIGHVDHGKTTLTAAITTVLAKKGLSELRSFDSIDNAPEEKERGITINTSHVEYQTANRHYAHVDCPGHADYVKNMVTGAAQMDGAILVVAATDGPMPQTNEHVLLARQVNVPKIVVFLNKCDMVDDPEMLDLVEMEVRDLLSKYDYDGDNAPIIRGSALGGLNGEAKWEDKIMELMDAVDNYIPIPQRENEKPFLMPVEDVFSITGRGTVVTGRIETGVIHVGDPVEIIGLEEKTLTSTCTGVEMFRKLLDEGEAGDNVGLLLRGIDKKEVKRGMVVAKPGSITPHTKFQAEVYILKKEEGGRHTPFHNKYRPQFYLRTMDVTGEVTLPEGVDMVMPGDHVTITVELIYPVALNEGLRFAIREGGRTVGAGQILKILAMFNYVKESYNELVHKVTWPTFAQLQNSTVVVMVASLIFAIVILAMDISFENIMEAIYRTLAKLGRMSETAKQWYVVRTIGGKENKVKEYIESEIRHSHLEEYISQVLIPTEKVYTIRNGKKVSKEKVSYPGYVLIEAAFVGQIPIIIRNIPNVLGFLGDTKEDSRKMIATPLRPQEVSRILGRVDELSSMEEENEIPFFVGETIKVTDGPFSSFQGTIEAVDNERKKLTVSVKIFGRKTPMELSFTQVEKEMAKEVAAFIKLQIKGGAANPSPPVGPALGSKGVNIMDFCKQFNARTQDKAGKVLPVIITVYSDKSFDFIVKQPPVAIQLKEAAKAKSGSAQPNRDKVGQVTWDQVREIAQDKMSDMNCFTIEAAMRMIAGTARSMGINVVGEFPNKMSKLTKNQKIAYAKVEPEKAYKLTEAAALLKEITFTKFDASVDVDVRLGVDPRKANQMVRGVVTLPHGTGKQVRVLVLCTPEKEAEAQAAGADYVGLDEYVEKIKSGWTDIDVIICTPNVMGKVGALGRILGPRGLMPNPKTGTVTMEVGKAVSEVKSGKIDFKVDKFGIIHTSVGKISFSAEQIADNVNTVLSMIMKLKPAAAKGSYVKSIFLSTTMSPGLQIDAKSVETKMTKEEKLVVIDSLAEQLNEYPHFYITNIEALNAEQTASLRRKCFESDIKLVVVKNTLLAKALERVEKADADLVKVLEGSTSVMFAHTGKTPAVLIKEFRKTSDKPVLKAAYVEGCVYVGDNQLDTLCNIKSREELIGDIIALLQSPAKNVISALQSNAGQKIAGIVKTLEERNMADVKKLAEELVNLTVKEVNELATILKEEYGIEPAAAAVAVAAPAAAAGEAAAAEKSAFDVILKNAGQSKLQVIKVVKDIAGLSLGDAKALVDAAPKAIKEGVSKEEAESIKAQLEEAGAEVEVKMSTTKTQQRVSFSTVKNRVPYPDLLEVQLKSFRDFFQMDTTAENRKNEGLYKVFQENFPITDTRNNFVLEFIDYYIDPPRYSIEECLERGLTYSVPLKAKLKLYCTDDEHEDFGVVVQDVYFGTIPYMTERGTFVINGAERVIVSQLHRSPGVFFGQSMHTNGTKLYSARIIPFKGSWIEFATDINNVMYAYIDRKKKLPVTTLLRAIGFEADQQILEIFDLADEVKVTKAALKKAVGRKLAARVLSTWVEDFVDEDTGEVVSIERNNVIVDRETVLQEEHIDQIIESGAKTILLHKENLSGIDFSIIYNTLQKDPCNSEKEAVVYIYRQLRASEPPDEATARDVIEKLFFSDKRYDLGDVGRYRINKKLDLDIDPAIRTLTREDIIAIIKYLIQLINSKAEVDDIDHLSNRRVRTVGEQLSNQFSVGFVRMARTIRERMNVRDNEVFTPVDLINAKTLSSVINSFFGTSQLSQFMDQINPLAEITHKRRLSALGPGGLSRDRAGFEVRDVHYTHYGRLCPIESPEGPNIGLISSLCVYAKISDMGFIETPYRTVTNGQVDLNNADIKYYSAEEEEGQVVAQSNVPIDDEGHFLQPDRIKAREGADFPVVTAQEVTLMDVAPNQIASIAASLIPFLEHDDANRALMGSNMMRQAVPLVTCESPIVGTGIEKDMISDSRIQIIAEGDGEVVFADATKIQIKYQRTEEEVICSFEPEITTYELPRYRRTNQNTSITLKPAVLTGDKVTKGQILTEGYSTQKGELALGRNLKVAFMPWKGYNFEDAIVISERIQREDIFTSVHVDEYIMEVRDTKRGVEELTSDIPNVSEDATKDLDANGIIRIGANVHPGDILIGKITPKGESDPSPEEKLLRAIFGDKAGDVKDASLKAQPSLHGVVIDTKLYSRAGKENKRAGKSSEKLQIEKLDEKFAAQVADLTKQLVNKLYTLLQGKTTTGITDYFGVELYPAGTKFTQKLLDELSRKVTDEKSGVAMGYLNLGTCKWTGDSHLDALVEKTINNYTIEWKKADAAIKREKYNLTNGDELPQTGVIQMAKVYIAKKRKLKVGDKMAGRHGNKGIVARVVRDEDMPFLEDGTIVDICLNPLGVPSRMNLGQIYETVLGWAGKELGLKFATPIFDGASLDQINEYTAKAGIPRSGRTYLYDGGTGEKFDQPATVGVIYMLKLGHMIDDKMHARSIGPYSLITQQPLGGKAQFGGQRFGEMEVWALEGFGAANILQEILTIKSDDVMGRAKAYEAIVKGDNLPKPGIPEAMNVLLHELRGLALSVKLEMSFNKDNKVNNGYSSISIGLASPEEILAQSSGEVLKPETINYRTYKPERDGLFCERIFGPVKDYECHCGKYKRIRYKGIVCDRCGVEVTEKKVRRERMGHISLVVPVVHIWYFRSLPSKIGYLLGIPSKKLEAIIYYERYVVINAGAAAEQGVERLQTLSEKEYLDIVGALPKGNQSLDDSDPNKFVAQMGAEAIYTLLQQVDLDSMSYALRHKASTETSQQRKSEALKCLNVIEMFRASEGRNKPEWMVLKVLPVIPPELRPLVPLDGGRFATSDLNDLYRRVIIRNNRLKRLIEIKAPEVILRNEKRMLQEAVDSLFDNSRKSNAVKNESNRALKSLSDSLKGKQGRFRQNLLGKRVDYSARSVIVVGPELKMHEMGIPKDMAAELYKPFVIRKLIERGIVKTVKSAKKIIDRKDPVIWGILENVIKGHPVLMNRAPTLHRLGIQAFQPKLIEGKAMQLHPLACTAFNADFDGDQMAVHLPLGNAAILEAQLLMLGSHNVLNPANGAPITVPSQDMVLGLYYITKPRKGVKGEGLTFYGPEEAIIAYNEKRADLHAQVKCMVSDVDENGNKVRVLKETTIGRILFNQVVPEEVGYINEVLTKRSLRDIIAVVMKKAGADKVAAFLDDIKAMGYQMAFQGGLSFNLDAVIIPEEKEKLVQEGYERADEVIESYNMGLITNNERYNQIIDIWTNINTKLTKTVIDTLIKDDDGFNPVYMMLDSGARGSKEQIRQLSGMRGLMAKPQKSGVEGGQQVIENPILSNFKEGLSVLEYFISTHGARKGLADTALKTADAGYLTRRLVDVAQDVIINEEDCGTLRGLTATAIKRNDDVVQTLYDRILGRTALNDVIHPLTGEVLCKAGEEITESIAEAIEKSPLESVEIRSVLTCESRRGVCAKCYGRNLATARMVQRGEVVGVIAAQSIGEPGTQLTLRTFHVGGVAAGTAVETNVVSKYEGRLEIDELRTVKGKNPQGEAVDIVISRQSEFRIVDPKTEIVLYTHNLPYGSMLYMSDGAEVKKGDMICEWDPYNAVIISEHEGKAVYDSVIEGVTYRDERDEQTGLSEKVIIESKDKTKNPVIKVINKEGEEVKSYNLPVSAHVVVKDNAKIKAGDILIKIPRAVGKSGGDITGGLPRVTELFEARNPSNPAIVSEIDGEVTFGKIKRGNREIIITSKEGDVRRYLVPLSRQIIVQENDYVKAGGALSDGAITPSDILNILGLTKVQEYIVNEVQEVYRMQGVKINDKHFEVIVRQMMSKVKIEDPGDTRFFEDQIVDKWEFMDVNDELYDKVVVTDAGDSTAVQPGQIISMRKLRDENSSLKRRDLNLVKERDIVPATSTQILQGITRAALQTSSFISAASFQETTKVLNEAAIQGKVDPLENLKENVICGHLIPGGTGMREYDNLVVGLKEDLEAIQAAKMRSFLVASQFKPCRANNRDTELFWLVFVAAMEETGSNETISDVDMIGGMPLKAGFRSDYMGSNMQTGRPGRSSMKQLLLTISALLFATAVCAEGYQVNTLSAKQLGMGHVGTGMKLNSESIYFNPAGTAFQTSRFSFSVGITGIKSNATYLSNNDYRGNPQIQAHSDNKISTPLYAYFNYKATKNLAVGLGFYTPYGSSMNWGDNWVGAHLIQSIDLQAYTLQPTISYKFWDKLSVGVGMTITWGTFDLSRSMFPVGEATNNTIAGLLTAAGQGQYAELFTQAGDRSLVSARIKGDAKTAIGVNVGILWDITPEWTLGFSYRSKVKMKVASGTANLLYASPEIGQVLQATGMIPDLSSACVETELPLPANLAWGVGFRPTPKWEMAFDIQYVLWSAYKSLHVDITDPTTGASVYDLPTSIKNYKNTVATRIGVQYHACKFVTARLGMYVDESPVRSDFLNPETPSMTKVSYTAGVTINPCKNVSIDLAYGYITSADPERTGSCDYYNSLTYKAVYAQTYGQLIAGGMAPEQAKIQAHTTANDKAIQPFSGNYSLSAHTFAIGVNLKFMISVVSLCARTSFGAILIHAFKNACLKTEQKYENKVEMKSTFKVLFYLKKGSEKKNGEVMIMARITIDGKLCQFSTKQSIQPDNWNTAAGKAKGRDAGRINALLDDIRSSLNTIYHEMQRRDNYVTAEKVKNEFLGHSESHETILSLFQKHNDDVKQLVGISKTIATYRKYEVTRRHLAGFIRSKYNVSDISIKEISPMFITDFELYLRTACKCGYNTTAKFMQFFKRIIIIARNNGILVGDPFASYKIRLEKVDRGYLTEDEIKIILKKKMVSERLEHVRDLFVFSCFCGLAYSDVANLRQENIQKSFDGNLWIITKRVKTNTDVNVPLLDIPKMILKKYKGKLPNGKILPVISNQKLNAYLKEIADICGIKKNLTFHLARHTFATTTTLSKGVPIETVSKMLGHTNIETTQIYARITNSKIGSDMQGLDKKFVGIEKIYKEAAMMAKQSKIEYSKEYLTSEELAAISKVKLPLSRQRKARDIFLFSCYTGMAYSDINRLRKENILAHSREKRFLRFHVSKSTLLYSFPLLDAPYDILKKYRGLQENGELLPVLPLPAINYDLQNVCAAAGIKKSVTLSCARKTFAFVVAPENGITASMLTGIYNEHNRMEAKVLSEAKVYVGTYAKYNNGSLSGAWLDLSDYSDKEEFYEACRELHKDEEDAEYMFQDWENVPEGLIDESWISENFFALRDAVEDLSDTEQEAFFVWCNYKSHDLGEEDADDLVRDFRDEYQGEYDDEEDFAYEIVEECYDLPEFAKTYFDYKQFARDLFMCDYWFDDGFVFRAAMQSLNKNGVSITQTPGEEKFVKCRLGAFRGQIYYQYDYRHTDGELFSTVAKTLDECRRRRDEWVAKKNGVINKMKTTEVNKELIGRRCECIFTGLMVTGVIEDTEENEHTIEVKVRFDHPHQWGDDLYNDVWAWGRKIDEFGTLHHLQLLEDKPDFQIMTVVFGEPISRIDRSVFEDVDTWGVCSLQGWVNSYESVRFVAIDDHTATITGEYNMEQVKVWLEKYTSIKSLKTSMVKIELDIEGISWYIETTLETDTVPAVGDIIIVDKDCISERDSAELWKTPSNQVFKWADEEDDAPVMVWFDCETEMLVNKRTWKYDIEEEETVCILGVKFIHYEDLMKNVMYKIIMGCYIVAALVLVTACNDNLDIQQAYPFSIETLPVPKRLKVGETAEIRCRLVRGGYYQPTTYQIRYFQPDGKGKLEMDNGTVFLPNDLYPLEKETFRLYYTSASTDQQTIDIYIIDSFGQMQQLTLSFNNDNSEEGTETITPMKRHIFIMMLFALCLTSFQAHAQRYLPGMKGLQVTAGMTDGVHWNAGSDFAYHIGAAYSVYTKNANRWVIGGEYLHKKYDYKDMQIPVEQFTAEGGYYLKFLSDRRKTFFLSLGLSALAGYETSNRSEKLLPDGSTLLDKDCFIYGGALTLELETYLTDRVALLLNARERALFGSDIGKFHTQVSLGLKFIINMKQIFGLFALLLGVCAANAQTADTVKYAAGNDLYRGITRKLPYRQMVTPYGVEVTFAKTVHIIFPAAVRYVDLGSNHIIAGKADGAENVIRVKATTEGFPGETNFSVICEDGSFFSFNAKYAREPEMLNIEMKDFLENEDTSDFSHTRMNIHFRELAGESPLLVKLIMQSIYKNNDRKVRHLGSKRFGIQFLIKGIYTYNGMLYVHTQTKNSSNVPFDTDFIRFKITDKKVPKRTAIQETVLDAVRSYNEVIEIAGKSTVRTVYALPKFTIPDDKLLVVELYEKNGGRHQTIRVENADIVNAEVIDELKIKMEDVQKNENGTTAQQADGKPKKENKPKRELTPQQVQQRRKMIVFPLMFLAFAGCMYLIFAPSGKEDVNVESVGGFNADIPLPAEDGIIADKQKAYEQAVTSRKQQDKIQSLQDFGFTLDDDTEEPQEEINLLPEEDPKPQRGGGASSRAAYRDINRQLSTFYETPPVDEEKEELKRQVAELTDRLKQQQNATPTADDQMALLEKSYELAAKYMNGQDGQRGQIAQIPTAGQNGGGIGTPAIPVQAIRETTVSGLQQPMSDADFIRAYSQPRNYGFNTAVGTGYAMGKNTVAACIHQDQTLVDGQAVKLRLLEPMQAGNIVVPKNTLVAGTAKVQGERLDILVSSIEYAGNIIPVELAVFDTDGQKGLSVPSSMEQEAFNEAMANIGSGLGTSISFAQSAGQQVAMDVTRGLLQGTSGYLAKKFRTVKVKLKAGYKVMLYAKQQMERKRNYIEKVQDWADDRLRRMCGRITPGKRLAVILLMFFFFGGLSIYITVSSIYNIGKRDGQRLQIEHIRQLPLHGNDTTKSINPLNRPQYGRRTEEMEFKSLTNIETSFRQIRLFALVFICLCALVTGFAVWNSYSFAEKQRQKIYVLDNGKSLMLALSQDMAQNRPVEAKSHVRRFHELFFTLSPEKGAIESNIKRSLFLADKTAFNYYKDLAEKGYYNRVISGNVTQTVEIDSVKCDFDQYPYKVNTYARQLIVRESSLTVRSLVTSCRLLNATRSDNNPHGFIIEAFTITENKDLQTIKRMLLAAVDFDNLHQVLRVLYDEMMPLCSNMTGVAKGIAGLGALFYVAAKVWQSLARAEPIDVYPLLRPFALGLCIMFFPTFVLGTINTVLSPVVKGCNQLMETQTFDMNEYRAQKDRLEYEALMRSPETAYLASDEEFDRQLEELGWSPSDMVTMTGMYMDRTAYNIKKSVRDWFRELLEMLFQAAGLIIDTLRTFFLIVLSILGPLAFAISVYDGFQSTLTRWISRYISIYLWLPVSDLFSSVLARIQTLMLQKDIEQLSDPDFIPDGSSTVYIIFMIIGIVGYFTIPTVASWIVSAGGTSAYNRNVARAGSIAGAAVGAASGKVTGKLLKMKRTILLMAVCLCFIGKASAQWVVSDPGNLAQGIINTTKQIVQTSTTAKNTLDGFMEAQKIFQQGKKYYDALKAVHDVVKGGIKVKKSIELVAEISEIYVRNYQNMLADPNYTPDELTAISAGYAKLLSESADVLQDLKNVVNVTGMSLTDAERLAVINNAYKSLLNYRNLVNYYTRKNISVSYLRAKKKNDTDRVLALYGSADERYWMKWIDNLIYTLLSACLLAGCEDSGSKELERMQGYWVHVRGHPAFTLSETGGRYTVTRKANVRGRILETAYPVTERNGCLFIETGFRIQFTYDKKTDRITLMPGGEYKRVTNPENKRMRNMLKATTLERKFPLLAVENGCIISKDADITVAFRVELPELFTVTSAEYETIHSAWYKAVKVLPDYSIVHKQDFFIKENYQPDTERDELSFLSRSFERHFNERPFLNHYCYLFLTKTTRERSRRQSDFSTLCRGRIVPQEIADKEAAAKFIEAVGQFERIMNDSGFVTLTRLAASEITGQDGKAGIIEKYFSLSQTDTTCLKDIGLYPEEMRVGDDILCLHTLSDVEDLPGKVGTDCRFEKLSTDRSDCRLSFAAPVGVLLSCNHVYNQFIFIDDHAENLKNFEQTARNMQSLSRYSRANQVNKEWIDEYLNEAHSKGLISVRCHCNVMAWSNDREELKRIRNDVGSQLALMECKPRHNTTDTPTLFWAGIPGNEADFPAEESFYTFLGQALCLFVEETNYKSSLSPFGIKMVDRVSGRPLHIDISDLPMKKGITTNRNKFILGPSGSGKSFFTNHMVRQCYEQGAHVLLVDTGNSYLGLSQLIHNRTHGEDGIYFTYTNENPIAFNPFYVEDGVFDIEKKESIKTLILTLWKRDDEAPKRSEEVALSNAVSAYIELIGKDRSVTPCFNTFYEFVRDDYRRQLEQKNVREKDFDIDNFLNVLEPYYRGGEYDYLLNSDKELDLLHKRFIVFELDNIKDHKILFPVTTIIIMEAFINKMRKLKGIRKLILIEEAWKAIASANMADYIKYLYKTVRKYFGEAIVVTQEVEDIISSPIVKESIINNSDCKILLDQRKYLNKFDSIQNLLGLTDKERSQILSINMANHPGRKYKEVFFSLGGTQSAVYATEVSLEEYYTYTTEESEKMELFALAEKLDGNLELAIKRLAESKRNPQSSTTMSEYPVNRGIGKPVEFKGLKSQYLFIFCGGLLAVFVVFIVLFMAGVNQWLCIGFIVSASLLLVWQTFRLNAKYGTHGLMKAAARKRHPRFIISRKAIPRLFNYKRRKEERTMRKKIFLSAAILAAVVSAYAQGNGQAGITEATNLITGYFDPGTKLVYAIGAVCGLIGGVKVYNKFSSGDPDTSKTAASWFGACIFLIVAATILRSFFLMVIYCILTGLLVYYIALWLWYRYTDSRTSPGRTDDAPLPRNGVSGYTLIGESRYKGGLIGTAQDKSGHIPQAAENDTIFAPQADGQPEENIPEAAAEAEETPGYENDEPDYEDEEIAGYMDGDDDTGRATGVSFDELGEAVRTANADNPTEAEKRQTAGTLASIEGTNLYDAVVENINGGLAKVAELLGRNEAELATAAVPAGTGDTSEEHEAFDMNDFLMAKQSGGMPKIDEDFMKELISQGVPSKEDNKPNDAPHTNLASQVTQEEQQTETVRVEKTTNRKRKGGSGDYRETYFQKVELADRQPLYVSRTTHEKLMRIVTVIGGRKVTVSSYVENILLRHFEQYQDEINTLYESNFQKPVMNGSNMENEKTPLYVAFSTQKGGVGKTTFTVLAASYLYYLKGYDVAVVDCDYPQHSIAGMRKRDAEQVGADEDYKRMAYEQFTRLGKKAYPVLCSSPEKAIATADEHIAAGHVPDIVFFDLPGTVNSEGVINSLAGMDYIFTPISADKVVLESSLSFAMAIQKLLVKNEACRLAGLYLFWNMVDGREKTDLYTAYDKTIKELELPLMKTFIPDTKRYKKELVADKKAVFRSTLFPASRPLVRGSNLEELITEIVYYIKLKMVDKTGQRRTNRDKVFRGRFFSLFLHRISRLKARLKEIFQSGKNDMTDFDFRQKIARCVLWHIEPFSVPENALPLSGVKITPKSMETRRTNKGGRPALADPAKHRHVLYLNDRENARFLSQWEQSGVTSKSRFIAARLFGEPFRVVKVDKSAVEYCARLTEFYAQFRAVAVNYNQVVKALNSNFSEKKALAFLYKLEKATTELAVLNRQVIDLTNECRELWLPKMVAKISTGGNMFGALAYNQNKVDSGEAKVLFSNRMLLGEDGNFSIGECMRSFEMQMPVQLSTKKPILHISINPHPEDVLTDRQLSDIAKEYMRKLGYGDQPYLVYKHTDIDRHHIHIVGLRVDENGKPLNDKFEHRRSKQITRELEQKYNLHPAERKERAERPELKKVDYAAGDVKHQIGNTVKAACYGYRFQSFGEYKALLAAYNVCAEEVKGEINGKPYQGIVYSAMNDKGEKVGNPVKASRIGKSVGYEAVQRRMEKSGEAIKNGKLKERTRKIVATAMQTARSRKELERQLKKQGIDVVFRQNDNGRIYGVTFIDHDSRVVLNGSRLGKEYSANVFNERFSGETGKIHQSEVAAPQQDQPTHQEQPGFTPKADIVSGMASVLGAFGGLLGGGASGGDEPQDTDRQKRKKKKKRTRRINMQQEDDLRGLARVMDFMRAVSILFVGINVYWFCYSTLKEWGVTFEVIDKILWNFQRTTGLFSSILWTKLFSVVFLALSCIGTKGVKEEKITWAKIHCSLAAGVVLFFLNWWLLELPLPHTADTVFYIATLSAGYICMLMAGTWMSRLLKNNLMDDVFNTENESFQQETRLIENEYSVNLPTRFYYKKKWNNGYINVVNVFRASIVLGTPGSGKSYAVVNNYIKQQIEKGFALYLYDYKFPDLSEIAYNHLLNHLDGYKVKPKFYVINFDDPRKSHRCNPINASFMSDIADAYEASYTIMLNLNRSWISKQGDFFVESPIILLAAIIWYLRIYQGGRYCTFPHAIELLNKKYADVFTILRSYPELENYLSPFVDAWESSAVEQLQGQIASAKIPLSRMISPALYWVMTGDDFSLDINNPKEPKILVVGNNPDRQNIYSAALGLYNSRIVKLINKKGQLKSSVIIDELPTIYFRGLDNLIATARSNKVAVLLGFQDYSQLTRDYGDKESRVIQNTVGNVFSGQVVGETAKILSERFGKVLQKRQSMTINQREKSTSISTQMDSLIPASKISNLTQGMFVGAVADNFDERIEQKIFHCEIVVDNEKVKRETAHYVKLPQIIDFTDKDGNDRMQEEIQANYDRIRQEVRQIVEDEITRIKNDPELCHLIKEEEMNLHSDKEAFKEIIALAADHFGYEQSHVEKDYWVSKILRDISMSEYADKTYFKGGTSLSKAYGLIERFSEDLDLFVFTGDKGASKQAEKTLNKKLSKYIAELNSDIYKEDLSETGGNYRKLYFSYDNVFQGVGLKEHLEVEIKSCDLPDKKLMFYPADKRVIKPIVTAFLESIGQEELISTYGLESFETQCINPRKTICDKVSRLVKLSYNEDAAALLAKHIRDVYDLSALYHNQEYNDYLHSEDFLDAMYRVTIEDGLNKNSRSHLSLADAPIFKDAEAVMALPEVATAYTTDLKKLTFDKSKMPPIGKAVEALKNLHEILVRFEAYRTKKQNEEQPMASFRKEILGQIERIDTGRIFTFRDLSFETEKTANVAVLLSEQSRKGVLVRVEKGAYYRPKKSVLGLGKLPVYQDEQFRYLTEKLNGYITGAYIYNKMGLTEQVATTITIATPNPVRRFRFKNLDIECVKAYCMVYPDESLVPYLRLLDAIKDMKRIPGTTGQDIYNRVKSQYFNGYSLPELEKIVSLAKSYPPRVRKVVADILGDIRQTVLQTEMAKTILPTTRFNLDYKTAMSFVSICKDSILCNHLQKHNKDFAEDVFFLSCHLIIGEMIKAIDANMYLYLFVENIAPIQEIDTANCIHFKLNSVVLNIHIDKKDNAKTNSIAFNIYFSFIFLMLQQNNENREICKLSKESHKYLVNKGKNADSSNIPLCAIIGLVYGLKHKEKRFTLFFCIGLVIGLGMKTKEILGILMLFLCTFSFISCDDDNEQTNELTPEALYQTSWRGTGHCEAWTVQNMGVGMQFVDTRKGKVNWEGYDEIDITYTIEGKYITFNSNALYLGGAPWIIKSYTQKHITIIQNEISPDKEKVATIELEKIDMEIQIFFIHFSYIQMIAEFNSYMSNIDIDFFKELCLKHGELRHYKKNEFILHEGDACSFFGFILSGVVKYSCTNRTENKPYNVGFSFPNEFIADYPTCLYGMKSELNIQAIIPCEIYICSSTFLQQKFKENNENQRIARIAAEQMFFQSYSRYLDLFRFTPEERYLQLLKKCPAILQMVSLKEIASYLKITPIHMSRIRRKQSFDNKKMAMLENKTKENPKLEQNKLSDGRISLYLEYYFLLKLLKVILSKRNTFYSYSFRQYLYLAVNRKKFSTVWIYRQKTDMLSIASLPPNANADTRHGDYRIKIIHLSYYQSFEYFLFFSIFAIFCYSVHFEISFSFVPLHPQKTKENQLFSVITRLRHLNRDKTSKQWQCMANRMTPPAEGQEKDVLLVLDKQQGKVSAVKGIDKEGNLQTVPPTHGGEFMQVDKNSDVFSNFISNFYRKYQDTSGLELFSVKASEAERDAKAIEENHRNPTPEGDKRAEMLRVPKPDFHEFKQGYRFDPAKIDWENLKKVGITADTLKNTKDFDRVMRGYKSRNTYTVSGTVGGFYLKPTDVKLSFYQAKDGTVVPKLHGVQQDEKLLQRPFHEHGFTKQEQGNLQGTGNLGGIAEIKDPKSGEQIPVFVSRDRYTHELEYMRADKWKCPDTICNVQVSPEQKAAFEAGQAVKMENLQFRDGTKRSAYLQVSAVERGLEFLPRAAVQFLQQGQQPAEQQVAGLKDGKGVEFNGHVQPGAQGKSHDKVQPKDVTPAAENRTQVAVNSGGKTNEATKQGKEPLKQGQDKPTPKQKEKQEKAQDKSLKADKPKKSRGMKMMIALIAEKPSVAKDIARIIGATGRNDGYLSGNGYMVTWAFGHLIQLAMPEAYGVANFRRESLPILPPDFQLIPRQVKAEKGYKADPGVLKQLKVIKEVFDQCDRIIVATDAGREGELIFRYIFHYLNCRKPFVRLWISSLTDKAIREGLDNLQPGERYDNLYLSAKSRSEADWLIGINATQALSVAAGQGVFSLGRVQTPTLVMICSRYLENKNFVPAKFWQLKAATASGGINFTAQSTAKWEQQPEAIAALQRVKDAGQLVVKSVERKEACQEPPLLYDLTTLQKEANTKLNFSADKTLSIAQSLYEKKVMSYPRTGSRYIPEDVFDEMPERVALLGQYPRFAGYAAGLDGTPLNRRSVNDGKVTDHHALIITENLPGELSKDERAVYELVAGRMLEAFSGKCVKDVTTALLSGGDTDFTVKGSVMKEAGWRAVFGEQETGGDEEAASLPPLQEGEYLPLSGVDLLEKQTKPKPLHTESSLLAAMENAGRELEDAELKASLKDAGIGTPATRAAIIETLFARQYIVREKKNLVPTDKGLAVYKIVKDKKIADVEMTGMWETALAKIEAGSMDADTFRKGIEVYATQITAELLSVQLSVAAGETCPCPKCGSGRILFYPKVAKCSNVDCTLTIFRNKCDKQLSDKQIVELVTKRKTGLIKGFKGKNGKAFDASLVLDEQFNVGFSFPEKKAKPKKMEQIKAHIAVSLDGHTATPDYELDWMPREVKELAAREHAAASCLLMGANTYNYIFEHWGGWPHKSKRSFVVSHYDTNVTPDCGVEFLTEEPLQRVYELKQETDMLVVGGGKLLTSLIKAGLLDSLTIYTVPVMAGKGIGFVGETSGSLWKLSESRVLDNGVVCSTYLFGGNIMLRKEEILERTSNGLAVFKHYLPGNWRIGRNFLNPLYEDSKASCNIYFDRRGGIYKMKDFGNDSYSGDCFFLVGQLKGLDCNRAADFVEILEIIDRDLGLGLASGTPVSVPPATVRRAVPDKPEETSEKPVKPYQFREQKFPLAELVYWQQYGITPELLERYKVCSLREYHSETAEGKPYTYTSSVAEPMYGYKGKQHIKLYRPFSTPRFLYGGSFGENYSFGLEQLPAKGDTLFITGGEKDVLSLAAHGFHAICFNSETVTIPPTLVYRLTFRFKHIVLLFDMDKTGRESSCKQEKLLEEFGVKRLLLPLPGTKEEKDISDYFKAGNTREDFLKLFIEFLDNLYSDTLIMLKSCEIDFNNPPAKAQEIISAGDVPLGTQGNLFGITGGEGTGKSNYVAAIVAGCICPAGAEVDTLGIQITANGRHKAVLLYDTEQSEVQLFKNVSNLLARAKQPDKPDELKAFCLTGMSRKERLNAIVQSMDKFYYQYGGIQLVVIDGIADLVKSANDEAESVAVIDELYRLAGIYNTCILCVLHFVPNGLKLRGHLGSELQRKAATILSIEKDDEPAQSVVKALKVRDGSPLDVPLMLFAWDKEAGMHVYKGEKPREEKEKRKERELVNVAHDIFGRQTRITYIDLCEQLQQVLDIKERTAKSYIRFMRERDIITKDTANQSCFVIGSYHLQRNASCPMEIITFESKAYKELDNKITAIADYIFNHMETARQSEEDMWVDSYEVCTFLKISEKTLQRLRVSGTIAYSNIRGRYFYKVSEIRRMLEERLIRSNKENIDNLITNHQLYAKERGNLRKDKMPVTLCFIKDKHKVMEHKIPLETYFAGLLQKVEWQIQEYEDTAADTLTLCRLCVDYLQEILGELKTFIISYPFASTEEEIHFFKELKPLLASKIIYYNTVYKIEVRFPSGSEDVQRDYLLSETDRISRSFQRNLAFYQYHRTKATYLDRQYFIRGKPDIQIIVDSFYYETDPQFSTSHDFKVAKILANELLEIYLTNRLHELERREQRKRVKNGFMGRLLRWTGTKRALVELIYALDACGCLNKGTVDIKEIVAYFEYVFDIDLGDFYHTYMELKAKTKDRTGFLSTLKDRLLMRMREQDMSFIYKTSDMEQRITSLLLPAPEAELEASCKELDEKVTWLLHNSRKMDNYLELEPFSKDGRLCAHVCDTLKSLPETPTLAAYKDYKAIIILLGMSTTHYAILDELAEQHRKRDEIPELTAYCDALHWMRPGRQYLCNVYNTVCHAFHLLRRNPVRGNRLLVTEKELRHAERMLPELGRQTFTEMVRLKGYMVYDAEKLADKCGMEYGSFRRKVKKMTGYTAKEWVIKERVKDVEHYLLNTNLTLTEVAFTTGFASTSNLNDFCKAYLLDTPGEIRRKAQETRKCTVTRTMNKGIKKTDNYFERVKQRANRTNYRYYFFDYLYFKGEVWGKKIGRMSGFILLFWYWWWVVVLPGNFLLINNVPQWSSLHLGYLGAMFLLICVFILARYRKARVQALLNRYRRSKHISAVQAYFLFLLPFVLFFLETWLFDEWGWTDCVKWNKMGAWWRVALITSLVGLWFSLSYLKRYNYKWGFNYIGNHLYINLLLKVQKWFQNATIIALLIPVFLKDLLYNQYCLVAYILLVGMFLGVKLATYTVEYAIYKSKFIGNKERMIKFILDAMYYQIFIFNRDKFILENPHERTIQIICGILFLPVIVLTYLLIKENFNYKTPFVFFIIIYVLLYKTFCSYYIKRKKGMEIIRSKPLIFNSQKISSFISWMIYPILVVLLYFIITHRHWLKIIQMKQKIYHIIIFLLFWFCGVAYSQNPKADILQQDLSGLFDNLSMIGILGEDCSRIDIHITEVRKMDSREYEIKGISRTRLSVICPFKGKVCVDSISSCSQMIKSEYTELDGFIYGYYSFAEYGDKRYSGTFSGSFKQGYRMSGQQIEKGRNEIAELKLNLSEYRGKWKSAKGLTKVCSWADEIIPDTPANFCLFNDAGEWIVSPKYRKNGWENLYNAYHNENLTTDEIQKAREVEEQEWWVNKSQSCKVIMEHFKEVPDVNRLIISPLYLREGLEFAKNQGYNDILISTDDIGISGVSCKHTLNVSLICEYDFIETLIISGYDFTIEPCNLNQLSVLPHLKKLGLWIDKVFTIDFSLFPKLEELKYYHTKQTENVDTLINLKRLHIYNLKSEDLKELKSMNLLEELTLWDAKNINLNGLCQLTNIRTLEIVRSRKMIDIRGLCNSNRLKELSLYYCNNITDISVLNRLSRVKILRLRNCKRLQDLTQLVPNNTIKQISISSLKDLKFLAGMKKLKFLHFDDVIDGDISPLLDSSLEFVGMVSKKKYSHTEKEVNLILERNRLNNKMYEEFLEKSLNSKRQAVDDTFIAKYADLSYPELNTLWQEVGLGSFCNGLFKLINPSDYQDVINSCFEKEDDQSFLPFMCTAFGDLFAYVKNPRLNNYVVYLNVRYGTYLILPANLRAIFNKVMVNESFLKGWFDLENYPIIQEKLGTPDYDECFGYSLLLALGGSEDIENIKIVKTIPYIDICTQTIGEFEIADKWMRNEILQLKDLGRMPNESINDSDSIDELINAYDTLLEQIQFPISFDEAMVLVQIFPENAFYDLQWSLLRLVESVCVDDDRYIQLINSCPSQEWRDTLNARYANYKKAQEVKMENVNKICPICRQHPITLPNEVCSVCYNKVKTQTDWNIAEWSKIENNGLDAIKVFAEYILDEIEDDEQHQWHQRRICFMQDMVEHLDKQYFPNATIQQINDFAHSAVDFWKGKINSQEAKEQLQSMRKVLQKDIMKLSDWEPKDFLLWMMMPEDDFDWMWNQWFECIHACIPDKSNDELWIRMFHKHFPNEIKAWVDNNNNDATNKAGMKKIIFYISAILFCLPIQAQQRFFGVIQDADGYTNVRDTSGTVIGKLLDNHVFVDWDAQKSHKEWHSVEYGAETGITKTCPNGNTHTGEIHKSRIRYLADLPQLKKQPQSTDKCLVYANDTLTIKIIFQKFNPQKHAIVYDLEAGFVRSIDGCSDLTGIDDNIPHEEYASVTVKHPAGILEFPTAYIAHLYEPSRNNVVVALGKGNSLFISTQNSDGAGGYYAVWTVENYLVKSLFVLHDFMDKVQKQRGSIVLYKEERNGADYIRIEYVNSQAVALLLAQDTDVEKTGNSSAYIPATAFKLPDFYDRYSPHAYIDYSRVYVRHPKPKREYILPRGYLELLEQKRYSLSTIKAYKIYFSDFMEYHKGQDLDLLTVEDINSYMLHMVKEKHISATQQNMRINAIKFYYEKVRKGKRQYYGGIARAKEYKALPEVLSREEMKSIFAQLSNRKHRCMISLIYSAGLRRSELLNLTPQDIISERMLIRIAGKGKKCRYSLLSEKLLNELRAYYREYRPQKWLFEGEQAGEQYSPSALVKILKEAARKAGIKHRVHLHMLRHTFATHLLEQGTDLRTIQELMGHTDIKTTAIYLHVSNAYKAKIPNPLDCLDDDMIITNREEVIDKAFGVFVRMNYEKASIITLAKACGVTKTGIVYYFPHKLDLFMAVADKYVLKMHEPENKFAAPADTLTEFIGQYVAGVAASMKRIVELIGDNSSPHDCSPNFYYFHFLSQVRMYYPGIRQKIEKIYRQDYDLWEKVIQKAKESGEIRSNTDVKKTAILFRQMFLGLSYEQAFLNGLNVDELAENFRHIYSLLKAMLNAEIIKKIVATMNKDAVIRLVNEQMWTKTDVPSFQAGDTITVTYKIVEGNKERLQSFRGVVIQIKGTGKTKMFTIRKISNGIGVERIFPLYSPHIESIEVNKQGVVRRARIYYLRNLTGKKARIKEKRAASTKMMKEKLVFVTNDDGYNSRGIQALLEVARKFGRVVAIAPETPQSGMSQAITINNPLFLREVSKGDGVEVYAFSGTPVDCVKIAFDYFLKGRKVDLALSGINHGSNSAANILYSGTMGGAIESSFYGCPAIGLSLDDHSLEADFEAAKIYSERIVRAVVEANPPTPFCLNVNIPKGRPEAVKGIRVCRQNKGYWREEFFRRHDPRGREYFWLTGAFVNSEPESTDTDEWALANGYVSVVPVQTDMTDYAQMAPLERILGMLIKILLIVAIVIQTIATLFAIRLIRTTKYNSIWILFTIGFTLLSVERVVQFLRANGQTLPYEVFVWLGLVISISMSIGVMYAHKLFKYIARLNRQRQLLNKRILTAVLRTEEKSRSRFAKDLHDGLGPLLSSARMSLSALQRESLPADQQEIIGNTTYVIDEAIRSLREISNNLSPHVLNDFGLARGIQNFVGKSSAMHDVKIRFTTNLRSERYDTDVEVILYRVVCELVNNSLKHSGCTEINLSLSKSGDTLALDYTDNGRGFNPAAVTDCGMGLSNIASRINSLNGRFDITSAKGVGMQAKIRVSTQAESAEKLMELCRIILVDDHSLFRSGMRGLLDRYDGIRVVGEASTGEEFLAMLPATEADVVFMDFAMPGMNGAETTEKALALEPGLKVITLSMFGDENYYSRMVQAGAKGFLMKDSPMDEVLRAIETVAAGGTYFCEEVLRSLASRMQTAVSGYEGSDERLSTREIEILVCVCRGLSNQEIADELFISKRTVDKHRANILEKTGCKNTASLVVYAVRHGLVDVLMAVALFGVALVGCSDNEETTPPTPPDPKPVDVYGWHMTKWEVGGDDTNFPKEVYIVFDEEKNFEMYQDVSSNGFVKMTGTYTFDETSKKLTGKYSDGENWAYDYTVSGVDWLFGQLNQETGEMSGVGETMVMTAADDSTYKLTFVYGIIPDEVINSVMVRSAEGVRILMGPISLFFIISILRIEHQKKHDSKKVQEKIIVLIFRFKSLVIIKMKTLSFDPIRADVAITEKEKSAALHANALLHNGQGAGNDFLGWVGLPSALGEEELQAIETEAARLRDLAEVILCIGIGGSYLGARAVYEALSDPFNLLHEHPAKPILLFAGQNLSEDYLARLLAAVENRSIAAIVISKSGTTTEPAIAFRLIRDEIEHRYGRKEAARRIVAVTDRSRGALKTLADREGYRTFVIPDDVGGRYSVLTPVGLLPLAAAGIDIRSLLAGACEMERATADGVPFDENPAARYAAVRNILYQQGFMIEILASYEPQLQYLAEWWKQLFGESEGKQGRGIFPASVTFTADLHSMGQYIQEGERTLFETVVSVAAPEHRVKIGSDPDNLDGLNFLTGKRLSEINHTAELGVSLAHADGGVPNLRIEIPRIDARSLGTLIYFFEKACGISGYLLGVNPFDQPGVEAYKKNMFALLGKPGYEEEAEKLRRKLMDHKIGSGARCAMIGYGSWATALAKVLTENEPSIGWYVRNPEVLESLRDKGRNPRYLSNVRFDRTRINPSDDLDRVVSEADIVILASPSAYLKKTLETLTVPLKEKFVISAIKGIVPDDYTTVVEYMHDHYDLSFKQLGIITGPSHAEEVSLERLSYLTVVCTDPENSHTIGHKFATEYIKLSYSTDLYGIEYATILKNIYAVAVGMAVGLGYGDNFLAVLISNSAMEMARFLRESYPDQRETRASAYLGDLLVTCYSVYSRNRKLGLLIGHGCTVRDALDEMTQVAEGYFAADCIRHINARHKVQMPIADMVYEVLYKGVPVREAMQELTTKLIMGLFSLTQELAIDLGTANTLIIHNGKVVVDEPSIVALDVHTGKLVAIGTQARQMHEKTNPNIKTIRPLKDGVIADFNATELMLRGMIKKVKTSGNLFAPSIRMVICIPSGSTNVEIRAVRDSAEHAGGREVYMIYEPMAAALGAGLDVEAPEGNMVIDIGGGTTEIACISLGGIVCSESINVAGDVFTNDIQSYVRQQHNIRIGERTAEAIKCSIGAALTELDEEPEDYVVTGPNMLTALPQTVSLSYGEIAYALEKSLVKLDAALMKVLETMPPELYADIVKNGIYLAGGGALIKGLDKRLNAKTGIPFHVAEDPLRAIARGTGIALKNINRFSFLMKMYKLIEFLRRIYVAVLFVVFEAIAIGYYAHSSNNTQAKLLTRSNQVVGGVNGIFADIRSYFTLGRENERLLERVAVLEEELAFYRRSAADSVRTDLLHDMGEKPYELTVARVISNSINKNRNFIVLDRGERDGVEKGMGVLSPEGAMVGYVAASSDRHAVAVSILNTSFNASGKLAGDDYFGSIYWAGDDRYHVRMKELSKYARVTEGEEVVSSGFSQYFPADVLIGYVESFSLADTQMAYDVVIRLAVDVSQLTDVILVRNRDIEDVQELEAEAERQNRRMYRTVPYIVLFLILALLQIFLFDNLSISIYLCPLVYIGFIVLLPIDAPPVAVLFLALSMSVAMDWAMGAAGINTIATLPVAMLRRPLLQSVCGKEGIREGGIPSSIRLGQGGFLRYLAAMVVVHHFLFFMLESLSWAQLFHTLVRLVVSGAVTVGFIWLLARLFTTKLTVRLMSYGGEGVARMRVLQVVVLIVFGVIAARLAYIQLIDSKYEELARGNALRYEVQYPSRGEVFDRNGEYLVQSRECYDLMVIYREMDREGFDTTLFCQVTGLSREGLVRELANARVRPRAPRMVMNYMSKEDKLRFDECNFAGFYTVYRTARQYPRKVGGNLLGYVGEVNSEMLRRYPSYQAGEYVGISGVESAYEPELRGKKGVKISEVDTHGAIKGSYMDGRFDSLPVPGKSIVCTIDARLQLFAEELMAGKVGAAVAIEPSTGEILMMVSSPTYDPDELVGRQRGNHYMELLYNKRQPLFNRAVSGRYPPGSTFKLVQGLIGMQEGVLTPSMRYPCHEGYQVGRLKMRCHAHTSPADLRFAIATSCNAYFCYVFRDILENPRYGSVKEGFDVWREYVESFGFGRKLDSDFLGEGNGYVPDRKFYDRRYRKSWNALTVLSLSIGQGELECTPLQMANLAAIVANRGYYYIPHIVRSVEGRDSMDRRFYEKHYTKVDPKYFEPIVEGMWQSVHKEGGTSRTAYLPGLDVCGKTGTAQNPRGKDHSTFLSFAPKDNPRIAISVYVENGGFGASAALPIASLLEEYYLTDTVTRPWLVEMVKQKTIYYPAYGKMENNGIGKLFEGVDRWTVLIYVLIVLVGFVAILSASYEEGAESIFSFSHFYMKQLVWMGISFAVAVVVLLVDASIYHKWAYLFYVLGLLTLVAALLFGREVNGAKAWFEIGSVRIQPVEFAKIATALALARVMSSSSFSINRAGDLFKVGLVICLPLLIIVMQNDTGSGIVLVSLLFVLYREGLNKWLCIPVILIAVLFIFSFLFTPLTLLVMLILVCTLSEAMMNGQWRSRMVYLAALALGTLLLYFGMLLAAPGAMDLYRCLLVVTLLSLIFVAIYAFRANLRNIFITIGLFLTAMLFVPTTDYIFNSILKEHQQNRILSFLGLVSDPLGTDYNVNQAKIAIGSGGWIGKGFLQGTQIKYGFVPEKHTDFIFCTIGEEWGFLGAMLLLTLFCLLIFRLMRMGERQEEPFGRIYCYCVAAFLLFHLLVNVGMTIGLMPVMGIPLPLVSYGGSSLMAFTIMLFIAVRLDASTRQYSFRMKEHQHRGLTSAQVEESRRLHGDNLITPRKGDSAWKLFAEKFRDPIIQVLLVAALLSLAMAFIDGEFLETIGIICAIVLATCVGFFFELDAMRRFKRLNLVNDDIPVKVVRDGEMTEVPRRDVVVGDLVYVENGETVPADGKLVKAVSLKINESTLTGEPEVDKTTDERFFDAEATYPSDALLRGTTVVDGYGEMIVEAVGDRTEAGRVTEQSSIASEEPTPLYKQLTRLSRMIGKIGIAVSIAIFVAMLAKAYLGGELSTGDWVQTSKELLRIFMVSVALIVMAVPEGLPMSITLSLALSMRRMLKTNNLVRKMHACETMGAVTVICTDKTGTLTQNRMRVEEIIHYASIDERLLAEIIAVNSTAFLDADANVIGNPTEGALLIRLREEGFDYAALREEAPIVDRMTFTTERKYMATIIQSKTTGKRLICVKGAPEIVRAMCMPDGKDAQVNEQLLLFQGRAMRTLAVAYAETTAERCEDALRDPQMLFVAVAAIADPVREDVPAAVARCMKAGIDIKIVTGDTPATAREIARRIGLWHDETDSSRNEMTGVEFAAMSDEELLERVQALKIMSRARPLDKQRLVRLLQRKGEIVAVTGDGTNDAPALNFANVGLSMGSGTSVAKDASDITLLDDSFTSIASAVMWGRSLYRNIQRFVLFQLTINFAAIIVVFVGSIFGTEMPLTVVQILWVNIIMDTFAALAMASLPPNPAVMNEPPRPKDEFIITPAMARTIFTCGTIFVGVLLGMLFYWRATTGELSLEQLTVFFSVFVFLQFWNMFNAKGFEACHSVLHDLRGSRTFFLVLLLIAVGQVLIVEFGGPVFRTTPLTWVQWLEVIGYTSLIAILGDVVRSIRRRIRPRPGCRMLLLCLLLGVSIGAFAQVDTLSPITPPLRRSPFIRDMERITSSRAYRITYIGVPLVVAGLVVQERDHGFRHLRNDYVPSFRFRYDDYLQYAPAALMLGLKIGGVRGRSSWGRMLVSDAFSVALMAGAVNSLKYTCRMPRPDGSNNKSFPSGHTATAFMAATMLHKEYGGRSPWYSIAGYSMATVTGVSRMLNNKHWLSDVLVGAGIGILGVSVRRFDLQGQGLDGIRAGFFLRPLLPTFVLRYGGKYGGGDGAVPPCFGGRGRIQCRREPGNRGSLVYESLCRVRRTYGRIECAGYTEYRRIDGPSGQLVRKCRGLFFISDYRALADRWQGFGRISVLMDGYTLGGHGGPVFGVGTSMTFRANYNLDLRFQTTYYLQPPMACGSRQHLNTLTLGLSANIAFMNVNNLMAELERKHPGENEYLQAVREVLESIEEVYNQHPEFEKAKIVERLVEPDRIFTFRVTWVDDKGEVQTNLGYRVQFNSAIGPYKGGLRFHKAVNPSMLKFLGFEQTFKNALTTLPMGGAKGGSDFDPTGKSNAEIMRFCQAFMLELWHNIGVDTDVPAGDVGVGGREIGFLNGMYQKLARKYHTGVLTGKGETWGGSILRPEATGFGALYFVQHMLHLAGKKLEGAKIAISGFGNVAWGASKKATELGAKVIAISGPDGVVTIPNGMNEEMIDYMLELRASNRNIVAPFAEKFAGTTFTPGKKAWSVKCDIALPCAFQNELNGDDAAELLKNGTWCCAEVSNMGCTPEAIHAFQKAGILFAPGKAVNAGGVATSGLEMTQNCMHISWSGKEVDEKLHFIMASIHDACVKFGKQKDGHIDYVKGANIAGFMKVAQAMLEQGVLMWFNVDAKIIFILIDCNLFCTKRLLFRTKRFCLFEKLKLNGFFEPGLSRIYYMEKVFARIGACERGFWKNIVIFVGIKPFLMSSDKYILQEVVDARTEREFLDLPRKIYKGNRNWVCPLDPSIQAVFDPKKNEMFSDGEAIRWIARDKKGEVVGRIAAFYDREHAFLEEQPTGGCGFFEAINDQELADQLFDAARMWLSSRGMEAMDGPINFGPRDSWWGLLVSGYEFQPLYENTYNPPYYKELFENYGFQNYFNQHTYLRRLEVGQLSDSVYERVKRLEESPGYCFKHISKKNLEQVAEDFRLVYNKAWALFSGVKAMDREQAFRIMNTLRPIIDERLIYFAYYNDEPIGFFIMVPDLNRVIGSFNGKFGWWNKLRLMWALKVAHKADRIFGLIFGVTPEFHGKGIEAGIIRAFEKEVPKLPYKSLELAWIGDFNPVMMRMVESYVCATKHKMHTTYRYLFDRTKEFHRCPRMGVKRREMKTTVFTKHHIANGAKMAEFAGYNMPIEFTGINEEHLAVRNNAGVFDVSHMGEVWVKGPKAEAFLQHITTNDVAALYDGKVQYTTMPNGKGGIVDDLLVYRIDAETYLLVINAANIDKDWNHIVEEGKKFGLEAGHGKQLYNASDEICQLAIQGPNAMKIVQKLCTEPVEDMEYYTFKKLKVAGVDAILSITGYTGAGGCEIYVANEDGEKLWKALWQEGSKEGLKNIGLGARDTLRLEMGFCLYGNDIDDTTSPIEAGLNWLTKFVDGKEFIDRKLMEEQKAGGLTRKLVGFKMIDRGIPRHGYQIASPEGDIIGQVTSGTMSPCLKQGIGMGYVKKEFAKVGTQIAIVIREKLMKAEVVKLPFIQQKMEGTFFTKHMNKELQAYVEQAILPRYEHFDRAHGPEHARTVIEQSLALARHYQVDRQMVYAIAAYHDVGLEKGREMHHIHSGEILAADTKLRQWFSPQQIAVMREAVEDHRASSDHEPRTIYGRIVAEADRCIDPPTIVRRTIQYGLANYPELDREDQYRRCVDHLTHKYAEGGYLRLWIPESDNALRLARLRELIRNRQELRRLFDEIFDREMAANGMMTIVLSSVLSAVVCLGIYILVTKYVTKKTIKALREAARKEAEAEGEMIKKEKILQAKEKFIQLKSEHDRQVNERNQKIAQSEQRAKQIENNLQNQQRELEGKVKENARLKEQMEAQLQVLEHKKEEIDRLMHEQNTRLEQISGLSSEDAKSILIENMKAEAKADAAAYINETIEEAKMTATKEAKRIIVASIQRVATETAIENAVTVFNIESDEVKGRIIGREGRNIRALEAATGIEIIVDDTPEAIILSGFDPVRREIARLALHQLVTDGRIHPARIEEVVAKVQKQIEEEIVEVGKRTAIDLGIHGLHPELIRMIGKMKYRSSYGQNLLQHARETANLAGIMAAELGLNPKTARRAGLLHDIGKVPDDEPELPHAIIGMKLAEKYKEKPEVCNAIGAHHDEIEMSSLIAPIIQVCDAISGARPGARREVVESYIKRLKEMEDIALSYPGVVKTYTIQAGRELRVIVGAEKLSDMESESLSHDIAKKIQDEMTYPGQVKITVIRETRSVAYAKMAQQQAIKLKIAGKSYSFTLKHEANEEQSLAEKEELYRLAEREVNAYVTRFEKAKYEGFSTQDCLAMAALQLAISSVSLARSREVGSEDLRRLEALRDEIDEYLNRIETEKKMAEKKVISDFEAQIRQLIADHRRLTALCKETAAERDVLRKENRDLQMQVKELGKELARVQLSQGLAGNAPDQSKAIARVNRLMREVDKCITLLNKPDRIGEELSGKMTFFSAIYLSPEIFSAFPKVYKKRQTTKFYFMIISFRVPRYGKRSGPIPLPGRELGVNCGHDRRPMKKINVITLGCSKNTVDSEHLMAQLAAAGYTVTHDSDRTDAKVVVINTCGFIGDAKQESIDMILRAAAAKQTGKIERLFVVGCLSERYAEELRAELPEVDEFFGVKDWDDIVRALEATPRPALATERRLTTPKHYAYLKISEGCNWKCGYCAIPLIRGPHASVPMETLLEEARKLAAGGVRELIVIAQDTTYYGLDLYGKRRLAELLEALCRIDGIRWIRLHYAYPTAFPDEVIEVMAREPKICKYLDIPFQHISDDQLAAMHRRHTKAQAYELIDKLRQAIPDLALRTTLLVGYPGETEADFEELLEFVRTVRFERLGVFPYSEEEGTYSARNLPDDVPEEVKQSRVERVMALQNEISLENNRARIGQLERVIIDSRQGDFYVGRSQYDSPEVDQEILIPAAGRRLIRGCFYQVRITAAEDYDLYGELETKMGFFDLFKKKQNTQPTTPAERSQPTSPENHRPAAVENTTKQENTSPQPAARTADREQAELNSGLEKTKTGLFSKLARAVAGRSTIDTQVLDDLEEVLITSDVGVETTVKIIERIEARVARDKYMNTSELQSILRDEIAQLMEESHRSTENFGLDVEEGVPYVIMVVGVNGAGKTTTIGKLAAQLTRAGLNVYIGAADTFRAAAIDQLAVWAERAGATMIRQEMGSDPASVAFDTLKSAVANKADVVLIDTAGRLHNKVGLMNELTKIRNVMGKVIPNAPQEVMLVLDGSTGQNAFEQARQFTQATQVTSLTITKLDGTAKGGVVIGISDQFRIPVRYIGIGEGIDQLKMFDRKEFVNALFGSEAKMAKKVVATLKTGTGKQFTKCIKMVKSDKTGAYIFKEGIIANDQVKDFFAEKKMAKKGNRVQVILECTEQKASGVPGMSRYITTKNKKNTPDRLERKKYNPFLKKVTIHREIKMKVCEITGKVAVIGNNVSHSHHKTKRKFSPNLKNKRFWSEEEGRWITLKVSAAGIKTINKKGLAVALREAAAPKKVYMLTGICTLALALQACTKSPAENPGRTDDPGNDEQNSKVTLTLSTPRTRTTLVSETYVHWSEEDIVQINGTNLPVIPDPNDPTRATISNVDTAEEYVALYSPDNGGYIPEREVVEAYFRPEVPHTPDSFYTTGGNPMVAYSTSTSLEFKNIGGLLRIGVTGDASIASVMLSGNAGEPIAGHFEISKSDLASGSLDFAPGEGSAQFVSTSVTMTCTENVRLDANSPTYFYFALPAAEYTEGFTVTLTDSEGNTCLRQTHNSVSIERATLKSMEPIAFEKDKALTVTLGEIAANSVTWNIEGNPSTDLRTLLVTKAMWDHFIAQEYYLDNPQKLTSEILAAYSATIPTDDNGRYEETATQARAVNSMQPVQEDNDYLVLAAYFSGTQSVGVIPAPVPVHTPAATGPAPEVNVTVSSAGSTTIDVLTTTSNASGILTALFFKSDYDNVFSREGIDEELIAKYGNAWTAEQVEQANNGGYTLQYISLPPETEFVMLISVSSAAGKATLKKEIIATEPYVDPSAEWITVSSEATFVCGFFFNQSIPSLSNVINITNLKVEKLADRDLFRLTDAFSVSRIPELAASGIYSDLSGSPYYFYMDATDPNNVKVVNEVCQLGIVHNEYGAMSVGNDFNIQGGEEYQHGTYNRAEGTIRIGVLICYADSQQLFVTPFNSTLYLNPETPGNSVSTENFKKDPVAIPWMLSHFVYIISQKVYLSKDPVFKAVPVFPKIVRIEGRWEMKASILTIGDEILIGQIVDTNSASIARHLNNAGIVVWERTSVGDQREQITEAVKRTMNQSDVVILTGGLGPTKDDITKKTLAELFGSRLVCDQTVADHVRRMLEARGIEYNRLNRDQALVPACCTVLFNAHGTAPGMWFEQNGKVVVSLPGVPFEMEHLMTDEVMPRLKARFSLRQIVHRTLITAGLAESMLAEKIADWENALPPYLHLAYLPAPGVVRLRLSAYEVEGESVSHEIDRQFAALQRIIPRYVLGFERATMQEIVHNLLTQRRQTLATAESCTGGSIAARFTAMPGASAYFLCGVVAYSNESKNNLLGVDPETIASRGAVSEEVARQMAEGARRITGADYAVATTGIAGPAGGTEQKPVGTVWMAVAGPHRTVTLLKQCGTDRGQVIDRASAFALALLRDEIERDAAGEMYRKLIKPILFAMNIERAHSTVLFLLRMIGKIPGGRALLRAIYRTEHPSLEREVFGLRFPNPIGLAAGFDRNGEAFRELSALGFGFVEIGTVTPQPQAGNPRPRIFRLPADRAIINRSGLNNKGLYKAIAQLRHRHDRLIIGGNIGKNTLTQPSQVAADYLKMFRNLYQYVDYFSINVCCDNCADGSVSHNKAHLMNILQPLFDFRRGQNQYRPILLKISPDLPDPLIDEVTDLMLSTPLDGIVAVNGTFSRKGLETDEETLDEIGSGRLSGAPLTQRAIEVVRRIHRRSHGAYPIIGVGGLMNARDVKAMLAAGASLVQLYTGYIYEGPSLVKEICRALIDDAASEASASPAPGKMAPPSPCTIFAPQLTNSNTVVKIVADNAIPFLKGVLEPYARVEYLPGKTIATADVRDADALIVRTRTRCDAALLEGSSVKLIATATIGFDHIDTEYCRRHGIEVATAAGCNARGVLQYVAAALVRLSRVQAWEPTDKTLGIVGVGHVGSLVEAYARTWGFRVVACDPPREEREHGGFLPLEEVACQADILTFHTPLDDTTRHMAGAKLFERMKPGSILINTSRGEVVDGQALRESGLQYVLDVWEHEPDLDPPLLRNALLATPHIAGYSAQGKANATALSVRTISRYFGLPLGEWYPSNIAPSRPRAISWQELCDTIDDRFDIAAESRRLKENPEKFETIRNEYRYREEYFMSSFLREPCAGAYGSRFGRRPGRPVGTPLKTGFIGDNDGGKSKIYYLCNSYKERLWIMDLKTFNPNGVGVDNGAYYGLPFTPEEAALVLVSAPWDVTVSYGAGTALAPDALIEASTQLDLYDASAPGAWLGGIATADIDYSLQEESRKLRADAERVIEHLEEGGAPDDERIERRLRRINEGCAAMNDNIYRQARQWLSQGKVVGLVGGDHSTPYGLIRAVAEKESSLGILHIDAHCDLREAYEGFEFSHASIMFNVLRDLPQVRKLVQVGVRDYCDAEAERAASDGRISMFDSRSLARAGFAGTTWAESCRRIVDELPEVVYISFDIDGLTIEHCPHTGTPVPGGITFEQVVYLMECVADSGRRIAGFDLVEVVPCPEDKIDAVVGARVLYKLCGLALRTSSAGRGMRLFSMYRWVRQHYQFQLRGRRFLEAPWSGGLVLLFSVAVAMLLANLPWTAEYYQRVLNIDIALVVRGPGSLIDWMFPRGLTLQTFVNDGLMVVFFFLIGLEIKREIVIGQLSSVRKAILPVLAALGGMVVPALIYFSFNAGTVAAPGWGIPTATDIAFAIGILSIFSDRVPISLKIFLTALAVADDLGAILVIALFYGEEVNLLLLAIAILILVGIYFLNKVGETRIMFYLVPAFVVWALFYYSGIHSTLSGVVIAMFIPMKPRYSKEYFARKMSGLSDALLKAECRADDFPNEEHRYYLRMMSSLATDSVGMSFRLEHLLAPYVTFLIMPIFAFANAGVSIDSLEYFRIFHVTPQAGAVGTGIFFGLLVGKPLGIFLASWLAVKTKLAEMPEGAGWKMLFAVACLGGIGFTMSIFVDTLAFADAEIVSRGKIAILMGSFASAVLGTVLIFLFSKKKTRIMKKYRLIAAAGLFLLGACSRGTGSMELRNETDSVAYVIGLNVGYNLQRMDSTLNVEAVCQAVRDVYARTARMTPDEARAVYLRYVNVSQPEQIRAYEEQFLEDFRKSNRSYAKTDTGLTYEVLEIGDESKTPRSDRDTVAIRFVAKTVDGKVVESSYERGDTTRTAVGDLMPGLRQSVRLVGEGGRMNVWIPSRLAYGAEGDKKLGVVPNATLFYEIELVDVRMALLAGAVIFASCSRSNGSITMGSKSQFDSLSYALGNNVGAGLNRMMSDIPFDFDAMTEGVTEGALGTAKMTHPEALDTLRTFFMVTRPERAQAIAKKNAMTPDSLKTPEESLADPAMFESEEERRFISYAFGIDLGNNMLGADLPIQLVWFGQGLKDITGNGEEARMTEQEAVKFLRNWYSVVRPAENKKANEEWIASIEKKSGVQKTESGLLYKIEKKGDETLMPTDSRDRVKVYYTGTNYKGQVFDSSYFENKPEEMKEYLKQIDPEGYDKDEAVEFELGQVIPGWTEGLKLIGKGGKITLWIPAELAYGRQARGKYILPNSALKFEVELEDVIPFVEETTPATTDEAAAATTQAANSALPVKKMEFEGVVYKILPLTQGTSARGEWQRQDVVFELPSEFSRKICVTFFNKPSDVAKLREGATYTVSVNVESREYNGRWYTDVRAWRLQPKETAQNAGIPPMPDAAPLEEPSYSTPAAEVDDLPFMKKGIHPENYRLVAFKDMSNDHVFLCRSAVSTKETIEVNGETYPVYKMEISNTSHPFYTGKMKLVDTAGRVDKFMSRYAKRYDKKAAKMRAKYLGLDLPSPIIVSSSPYTSNVKSVEQCAASGAGAVVLKSIFEEQILHHAAALDTVSDSAYGDAEVYLQRYLGEDYKAGFLRLVQEARSKTELPVIASINCVVDKGDWIEYATAMADAGASALELNIFIQSTDIHAQARELELNYAEIVGRVAGAVKIPVSVKLPMRLTNVFALSSALLGHGARGVVFFNRFFEPDVDVERMTFVESSPYSEPTELRNVLRMVAICSAVLPQLDLSVSTGVHDGEAAVKALLCGAEAVQVCTAIHQKGFEVIAEMNEYIDRWSERQGFGSLDEFRGRLNFKNDTSAMFQRVQYMKYFPSEAKMNEQTPRAERLHIAFYGRRNSGKSSLINALTGQQSAVVSATPGTTTDPVLKTMEIHGLGPCVLIDTPGFDDEGDLGALRVQQSRKMLDKTDLAVLLLSGAVPQNDEIEWFRLLEARHIPIVVVRSKADLFTGMSDAEAEALFGQRPLRVSASDRTGLDALREALIRNLPEDYNQPEITGSLASTGDVVMLVMPQDIQAPKGRLILPQVQTIRELLDKKCRVVCCTTDQIEGTLSSLAAPPKLIITDSQVFSTVYAQKPAASLLTSFSVLFARYKGDIDYFVESAAAIGQLREDSRVLIAEACTHAPVGEDIGRVKIPAMLRKRIGPALRVDVVAGTDFPADLTPYDLVIHCGACMFNRRHVLSRVAQARAQHVPMTNYGVAIAYLQGILDKIEYMYQVASSKAEEFIHDGEIVETLAYARENRANRPLIEAILQKAAEGKGVTHREAAVLLECELEDLNQRMFTLAKQIKEKIYGNRIVMFAPLYLSNYCINGCVYCPYHQKNKTIPRRKLTQEEIRREVIALQDMGHKRLALEAGEDPRNNPIEYILESIKTIYSVHHKNGAIRRVNVNIAATTVENYRKLRDAGIGTYILFQETYNKTAYEALHPTGPKSDYAYHTEAMDRAMEGGIDDVGIGVLFGLNTYRYDFTGLLMHAEHLEARFGVGPHTISVPRICPADDIDTKDFPDAISDEIFRKIVAVIRIAVPYTGMIISTRESQRSREQVLEIGISQISGGSRTSVGGYAETTHAEQDSAQFDVSDHRTLDEVVRWLLELGYVPSFCTACYREGRTGDRFMSLVKTGKIADCCTPNALMTLKEYLEDYASPETRALGEKMISKEVPMLLNERVRRITEKNLAAIAEGKRDFRFMKELVDQLKRNRTLSPEELRLLLTDASPEEREYLHRAAREVARVHFGNGVFVRGLIEISNYCRNDCRYCGIRRSNRLAERYRLTPETVLACCEEGYRLGFRTFVLQSGEDPALNDELLTGLIREMRRRWPDCAITLSLGERTEASYRALFEAGANRYLLRHETITPDHYRWLHPVRMSLDHRIECLHTLKKIGYQTGTGIMVGSPGQTVDDLVRDLLFIREFEPQMIGIGPFIPHRDTPFGHEPAGSVERTLTLLSILRLMRPAALIPSTTALATLSGDGRMRGILAGANVVMPNLSPPDERSKYNLYDGKAAFGAEAAEGLAALERELNEIGRHISWSRGDYQEMRRKFRLTFYYSDMPLTNNVMIVRHKLLTNLIKLWKDNQLVERIDRLPIELSPRTSRVLGRCCVHKERAVWKYKSFPLMGFDMSDETDELTPLSEYARKALERKGQQQKDNILCVIDEACSSCVQTNYEITNLCKGCVARACATNCPKNAIEFNRAGKAVINHDLCISCGICHSNCPYHAIVYMPVPCEEACPVKAITKDERGVEHIDESKCIYCGKCINSCPFGAIFEISQVFDVLQRLREGEKMVAVVAPAILGQYNAPTEKVYGAIKAIGFEDVIEVAQGAMETIRNEGAELEEKIEEGQAFMTTSCCPSWVELANKHIPEMKPFISSTGSPMYYAARIAKEKHPDAQVVFIGPCVAKRKEARRDECVDFVMTFEEINSIFDGLGIEVETTDPFPIPFVSTRAAHGFAQAGGVMGAVQLFLADNNRPQVEGIQVSNLNKKNVSLLRAYAKSGKAPAKFIEVMACEGGCITGPSTHNLHDAGKRQFAKELAKRMRCIIETQSWIRPQNDPYRLENFQQAYDNIVSGESKIVRASDEFAASARSVRKEFSATAKTQLKLKATHYALKIFPKTEEEQRSLELDEQIKIAYTPFNYTSLPDEATQSLVFSKSRTQFCEEDEERRYSVTYEGGMIKDGPVEPVTIILPVLYAVWPVEKTFPVEMDFEILYEVFLPKYITLGENGLSAEAIQILEQEAIALALDEERHLPGGFPRGKVLCYDTHLKRYVPLENLKIRFTLGSNIEEVYTDKTGYYAINNKLIDNQATVSFVFQHEKWTIVKGSEEGGRIEEIKGIYGELRSGKDLNFNINSSSAPDPRYEIHRAVNFYHYGEHDFIISTFVNNRISIVALAVDPGGWQGRFNYWPTSVGRMPFIQVGNCNRNNHPRLIGTTLHELGHYCQFHLRGGTFSAYDGTWNILLESYASYAGWHMGEAYYLNQGWKKTSLNSDITGQARQEWDYQNTTNNYYTPLFVDLVDDYNQGVGYPSRCYDQIKMPQFVVNLFGAYRTWNDFESALRKYTGSYFTENQINEFLFYERSWLQRNGYIMILPGESFTAMDNGMGVCPVPSSYIWKMTIIFDDGRLGFTYGVRYYQDDGRSYPPNYDAHYDPSIDDNYVFEDLRGNGRQPKERWTYVFTNADYDAAEAMVPFEMNKIKIGLFGFGVVGQGIFQVLSKSRNAHAEIVKICVRSNKPRSIDASYFTTDPEVILSNPEIDLIVEVIDDAAASYKIVKAALQKGIPVVSGNKAMLARHLPELIDLQKKHNVALLYDASSCGSIPVIRNLEEYYDNDLLLEVKGILNGSSNYILSRVFDHQESYDAALAQAQALGFAESDPSFDIEGYDSLFKLVIITVHALGVYVHPDRIFTYGISTIHDSDIRYAREKGVKIKLVAQVVKVSDRKFTMFVMPEFVTPGKYIYSVDDEYNGVVIRGECYDRQFMFGKGAGSLPTASSILSDIMARQHDYRYEYKKQHYLDRPEYTTDVELKVYVRYTETDVLKILHFDRITEQYRGEDGNYVIGYIRLSELLAKREVLRGKDVFMADFQSFFQELDRMNIYRHNQPFELERGGILPELTIAFSTYGKLNAAHDNVIWVCHALTADSDVASWWPHTVEAGKFLDPAEHFIICANILGSHYGTTGPLHVNPATGRPYYKDFPELTIRDMVRAHRLLADILGIHRIHTLVGSSVGGFQAVEWAVQEPERIGKLVLIATAAKASPWSIAIDETQRMAIEADSTFGEPYATAGMKGLAAARAIGLLSYRGPEGYDLSQQDESDDFSSHRACTYQQYQGEKLCRRYNAYSYYKILNAFDTHDVGYQRGGVAAALQRITAECLVVGISTDIIFTVPEMQALHRMLPRSTYHQIDSPFGHDGFLVEHEQLNRILNPFIHPTHEMKKQNLRFETLQVHAGQQADPATGSCAVPIHQTVAYTFESAEKSAAVFALTEPGYIYTRLNNPTTAVFEERIAALEGGTGAVATASGMAAQMLAITNIAQAGDNIVSTSYLYGGTTNQFKYTLRRLGIEVRFAQGDDPKSISALIDDRTRAIYIETIGNPAFNIPDFEAIAEIGRKHGIAVIADNTFGAGGYLCQPIKWGANVVLHAATKWIGGHGNSMGGVAIDGGNFDWGNGRYPLISEPSEGYHGFNFWENCGDQAFAVRARCEVLRDTGACQSPFNSFLLLQGLETLSLRVQRSVDNALEMAQWLEKHPKIESVNYPGLKSSPFHDLAKKYLTNGFGGVLTFRVKGSAEQASSLLNHLEIISHLANVGDTRSLLVHPASTTHSQLNERELVASGVYPNMLRFSLGIEHIDDLKEEIGNALKRLMVLKVDLCFRDCYKQKNPAEPAGFKRYTYDESYTRHLHLRIDIIIPIIETESPTISEMKCVGDILGTEFCWPKEKKIKYKIAFYPISEVMFPKDMKDKCNPRKRSIIGVMKYLNIKKALTAWQNLQPLSEKDRERLSRRFTVDFNYNSNHIEGNTLTYGQTEILLLFGKVIGEADVRDVQEMTASNVGLRMMTEEATVKGMPLTQNFIRTLHKTILREDYTVYRDLPGGMQTSYVIHAGQYKTRPNSVITRYGDRFEYASPEETPGLMGDLVAWYNAAEQEGKLSPVELAALFHYRYIRIHPFEDGNGRIARLMVNYILTRHDYPMIVVRSRRKSEYLEALHQTDLEVGPVPSDGAHAGIKDIRPFLKYFNDLVATEVYNDVLFVSERNENVWWYDGERIAFRTPNYTKILNAMRTQPTLTLADMKDETGISMTAIQKLLDQLISKKYVERGERDGSWRVFVSQMYLSILRLWNFRKYAGADNKPGLEIHFQKGVNVLIGENDSGKTAIVDAIRYVLRTQSGEFIQFEDKDFYQDSDGNRKDEFKINVKEKGKVNDNTAKMQSTNQLGVMSRSTFKILFYVKKGSERANGYLPLMCRLTVDGEIKQFSCKLDVPPKLWDVKTARATGKSVEAQKINAAVDRIRVDVNRRYQELMQSDGYVTAARLRDVYLGLGVKRETLLKLFEQHNEEFIKKVGHSRVQGTYNRYRTIYKHLCEFVPKVYRRDDIPLKELNLTFINNFEYFLRTEKKCRTNTVWGYMIGLKHIISIARNSGALPFNPFAGYINSFESVDRGYLTEREIQTLMEVPVKSGTCELVRDLFIFSVFTGLAYADVKALTTDRLQTFFDGNLWIITRRRKTNTESNIRLLDVPRRIIEKYKGLSKDDHVFPVPSSSRCNVILKELGRQCGFKIRLTYHVARHTNATTVLLSHGVPIETVSRLLGHTDLKTTQIYARITNQKISSDMEVLSHKLEKMEKEICDAIMQLFCLRYVWRNIQGYEMRTAIRDVAEGMDMGLETGSVPGFSCSLYGGVDFEEDYREVTGWSAVGKEAIPADVDMGKTTRTCNAEGAGEPSPQPEPLFMPYPDMKRGSWTILFLFPCRTCTTSVAVFAFMKKYAHAKREEDFFTSNQPAGPPCGTGLKNNYFCRKKMADKSAEKERLFNEWFTKSYDRLRGTLRRYGMLDEDNFHDTYLFVRRQVLVPGKDITDYDAYFIGCYKKAALVKIKRENRYAHPEDDFFLRCGEEAKFLSEDDLNGCERLVKDILRFVRQKFSYEEYRMFMLRFYEAQFSFKALAECMGISASAISQKVCRIVDAVRTHSGFAWRSRMLAVESFMYMALIVYNRENSRPQEVTYKGKRTINLDSRGTVYLSKTMSIELGILGGGRVNFAHDDETGDWYICRADDSEGFIVWKDKRCARFSAGFIVQRLMRQAKVERKSVQFMMARMPVEIGGVAYYKILLANPILRMNTDNRLLTRESSEHIREFFSTVERLSVSMERLFAGRSPAMAGENFYTDRELAEKLKVSRRSLQQYRDSGLLAFTRLGGKILYRSSDIEKLLDGCYREARTRPEELMIMEIVNIEARTFEAMLSAFRTFADRLDTLCRLYGDIEEKKWLDNQEVCLLLKVSPRTLQTLRDNGTLAYTQICHKTYYKPGDVESIIRIVEERRKRAESMGRSIMPASVFVRQASFSPDMEEHPDNRPLYRDGTKLMDIRHVHKRLHDNIWRIFLLYKSIKVHLMKKKDRFDSNMKEGKEDMPLVGKTMAEGHTHRMAVLCEKLGSTLREILDGTCPQPAKPEKAPKRPALEKYRETYLIPPKIKGPKAVFISEETRSALDMIVLRLGCRGMSVSGLLENLARRHLETYRQDIERWRKLMEQGEIILYQPDEAVKLEVRLEDETVWLTQEQIADLFGTKRPAITKHLNNIYKSGELDIDSTCSILEHMGNDGKQRYTTKYYNLDAILSIGYRVNSKNATLFRKWANSVLKDYLLKGYSINKRLSELERTVAQHTEKIDHDPLQLSQQPVYQQPCPVKACLVRELCQLVQIVRHSRQAAQQRILFRRMPCRNGGRQCHLPDIDRQTPAGLPCPESESLVADGGELHCHSLGQLPRPAQCRTAAFFLHLIHILCHMFFLFRPYFFHSKICDRREWIYPPCNRRALGSKGFRESGNITLLLLLQNPPFKTTGNININGFRMSTYSYKNPKFINSPKGVVEVVEVIYDGKDDPAYSLAIIKWENTYKLGIRWNIAYSEWDDYRKQNGQDECIGNPQSRGIPTWFVLPDDMMFGEKFSGAMQRLDELRKGKMSKAKVISVLNHKGGVGKTTTTINLGGALRQKGYKVLLIDLDGQANLTESLGFSAELPQTIYGAMKGEYDLPIYEHKDGLSVVPSCLDLSAVETELINEAGRELILAHLIKGQKEKFDYILIDCPPSLSLLTLNALTASDRLIIPVQAQFLAMRGMAKLMQVVHKVQQRLNSDLSIAGVLITQYDGRKNLNKSVSELVQETFQGKVFSTHIRNSIALAEAPTQGQDIFHYAPKSAGAEDYEKVCNELLTEIKMAKKNDLKNSMSAGLTGGLDSLIQSTAGQKEAQKPKKAKTVHCNFVMDETYHQNLKLIAIRKGDSLKSVLQEAISDYLDKNSSLLMLGAIFGTLLMGCSDEEIANVETSSRNAIGFNVLSNAAETRATPTTPDNLKNTDFDVFAFTGDGTAFMGKVDTEFGHDGVNIVYNNGKWDYKNASDLRYWPTGALDFYAFNPGTVSEDMMMNYMWEASGTVQKISYTCIDEYGANTGHANYDVMYAMAKGQTKDMNNGIVKFNFKHILSQVVFKAKTQYDNMQVDINMIKIHNVKMGGFFTLPATADGTGSWSDPADLPSEVSGLGKFTVVKDVNITVKSNTIATDISTTTPMLNRPQELTAWKVSETATKSKLEADNAKQCYLEIACKIRQSGAYLLGSASEYKTIYVPFGDTWVAGKRHIYTLIFGGGYNDQGEAVLNPIQFDAETTDWGNADKADKDVNVMIRIRFCLVFIFLWIGLTACEHKDLCYDHPHFATVRVIFDWTKISNHDKPEGMRVVFYPTDDESNTWIFDFPGGEDGEVELPENDYRVICFNYDTDGMVWKENGSYTLFTADTRDVQSPDNRTMAVTPPWLCGDHIDRVILKDIPGGSAEIVRLTPVNMVCHYTYEVNGLRGLDRVADLRAALSGMSGSLNMSGDSLPADLSESLLFDGMVSRNQIIGGFYTFGHSALEGEPNVFRLYIKNRSGSMSVLEQDVSDQVHDVPVAGHVGDVHLVLNFDYEVPSEPGSGGPGFDVDVDDWDDVNVDIVLMTKRCFYIKCVLFVLVLSISGEISAQEKRDSVRIYFHQGKVNIDTCLLDNGNEMERFAKICSALNDSVRLIRKIQIIGGASPEGGGLLNGRLSEKRAEVLWRYISPYIKIPVLEWDFHFSGSDWNGLITMVRADVNVPEREDVLRLLEKIVRLENQDSPYWGGELKRLKGGRPYSYLYKFHFPKLRSSMVKICYDSDPINPVRDTVYIHTRDTLCIRDTVTVIAPVKKRPFCMAVKTNLLYDAVLIPDIGVEFCLGKNWSVAGNWMYAWWKSDRKHNYWRIYGGDVELRRWFGRRAVEKPFSGHHVGLYGQIVTYDFELGGKGYLGDKWSYGGGVAYGYSLPVGHRFNVDFTLGIGYLGGSYKEYIPLDGHYVWQTTKKRRWFGPTKAGISLVWLIGRGNYNEKKGGRQDLSQTMQVVDITHLPQVASKGDTHFVVYKDAEGSHIRRLDPEERITEIAKMLSGSQITEAALAQARILTRSEATADVEDLLYIVNFENEAGYAILGADDRLEPVYAVVDEGSLTTEEFRYAVMETKLQSKQQYPRFIQNKPCGIDKFDGGSQERLAKTIARHFCQNDSLDEECTLPRIIGIEGIWGSGKSNVVKMLERELSDDYYFFEYDAWGHQEDLQRRSILELLTSKLIDDGILSGNATIKVKGGGTKTVSWSEKLKYLLARKTETVTEKYPLISNGMVAMRPYRLHNKYLYGKRLGMMRKIVDNYSGRTMMLNGEDYDTLALLENRSIANYRHLLDGIDLLAIDEAQNIPQIGSILKLIVDEIPGISVLASGSSSFDLLNKTGEPLVGRSTQFLLTPFSQREIAQTETALETRQNLEARLIYGSYPEVVMMENYERKTDYLRDIVGAYLLKDILAIDGLKNSSKMRDLLRLIAFQLGSEVSYEELGKQLGMSKTTVEKYLDLLEKVFVIYRLGAYSRNLRKEVTKAGKWYFYDNGIRNAIIGAFSPLAIRQDVGALWENYIIGERRKANFNEGLHREFYFWRTYDKQEIDLIEESADSLTALEFKWGNKMPAAPKAFQEAYPYAEFHVVNRENYLEFVMNYFLLAETDFFRLINEAGDCNMETAYTAFATQVIELCNGGMDMNLTVIALAYIEIELQHHPVRNLSEEKREIAAYVSKALSFVRKMQKFLATPQVPPLISANNATETTASLLQWTGNAIDLVELIYGIDVMGCINNGNMPLKQLAPLLYKIFGVDSKDCYRFYTDIKRRKNESRTYFIDRMQEKLNERMLRDEELERMRKMAKNAAENKKSNTQFYKVLDFRGIKFSIFSQGQIISDLNCLMGKVQILAVLTMDGCLSSELYDKAHQDLCLDRCGLDEIRKKAFYRVTPDYSISMLHEWRKDCTNIRYLAEATPDTADYINGLLRMHAVDEIILYTVPFISGSGRHFFKSALPEQHWTLSSLKSYPNGVCRIIYILDKKARMNKTKIIVVEDNIVYCEYVCNMLSREGYRNMKAYHLSTAKKHLQQATDNDIVVADLRLPDGSGIDLLCWMRKEGKMQPFIIMTDYAEVNTAVESMKLGSIDYIPKQLVEDKLVPLIRSILKERQAGQRRMPIFAREGSAFQKIMHRIRLVAATDMSVMIFGENGTGKEHIAHLLHDKSKRAGKPFVAVDCGSLSKELAPSAFFGHVKGAFTGADNAKKGYFHEAEGGTLFLDEVGNLALETQQMLLRAIQERRYRPVGDKADRNFNVRIIAATNEDLEVSVNEKRFRQDLLYRLHDFGITVPPLRDCQEDIMPLAEFFRDMANRELECSVSGFSSEARKALLTHAWPGNVRELRQKVMGAVLQAQEGVVMKEHLELAVTKPTSTVSFALRNDAEDKERILRALKQANGNRSVAAELLGIGRTTLYSKLEEYGLKYKFKQSMERSGNFYKAIRLGYILISILIGCMAYNSLYEWQEIEALELGNKKIDELRKEINNINIQMIKFSLLGETILEWNDKDIEHYHARRMAMDSMLCRFKATYPAERIDSVRSLLEDKERQMFQIVRLMDEQQSINKKIANQIPVIVQKSVQEQSKKPKRKGFLGIFGKKKEVTPAVSTTILHSVNRNVISEQKVQDRQLSEQADSLAARNAELNRQLQELICQIEEKVQTELQSRENEIVAMREKSFMQVGGLMGFVLLLLLISYIIIHRDAKSIKQYKHKTTDLIRQLEQSVQRNEALITSRKKAVHTITHELRTPLTAITGYAGLIRKEQCEDKSGQYIQNILQSSDRMRDMLNTLLDFFRLDNGKEQPRLSPCRISAITHTLETEFMPVAENKGLSLSVKTGHDAIVLTDKERIIQIGNNLLSNAVKFTEEGGVSLITEYDNGVLTLVVEDTGTGMTEEEQKQAFGAFERLSNAAAKEGFGLGLAIMRNIVSMLGGTIRLDSKKGKGSRFTVEISMQEAEEQLGYTSNTPVYHNNKFHDVVAIDNDEVLLLMLKEMYSQEGIHCDTCTDAAALMEMIRQKEYSLLLTDLNMPDINGFELLELLRSSNVGNSPTIPVVVATASGSCNKGELLAKGFAGCLFKPFSISELMEVSDRCAIKATPDGKPDFSALLSYGNEAVMLEKLITETEKEMQAVRDAAKEKDLQKLDSLIHHLRSSWEVLRADQPLNVLYGLLRGDALPDGEALSHAVTAVLDKGVEIIRLAEEERRKYEDEMNIINLGILAHIDAGKTSVTENLLFASGATEKCGRVDNGDTITDSMDIEKRRGITVRASTTSIIWNGVKCNIIDTPGHMDFIAEVERTFKMLDGAVLILSAKEGIQAQTKLLFSTLQKLQIPTIIFINKIDRAGVNLERLYMDIKTNLSQDVLFMQTVVDGSVYPVCSQTYIKEEYKEFVCNHDDDILERYLADSEISPADYWNTIIALVAKAKVYPVLHGSAMFNIGINELLDAISSFILPPASVSNRLSAYLYKIEHDPKGHKRSFLKIIDGSLRLRDVVRINDSEKFIKIKNLKTIYQGREINVDEVGANDIAIVEDIEDFRIGDYLGAKPCLIQGLSHQHPALKSSVRPNKPEERSKVISALNTLWIEDPSLSFSINSYSDELEISLYGLTQKEIIQTLLEERFSVKVHFDEIKTIYKERPIKKVNKIIQIEVPPNPYWATIGLTLEPLPLGAGLQIESDISYGYLNHSFQNAVFEGIRMSCQSGLHGWEVTDLKVTFTQAEYYSPVSTPADFRQLTPYVFRLALQQSGVDILEPMLCFELQIPQVASSKAITDLQKLMSEIEDISCNNEWCHIKGKVPLNTSKDYASEVSSYTKGLGIFMVKPCGYQITKDGYSDNIRMNEKDKLLFMFQKSMSLKMAFNRKQKLRDNIEAIRTAFILDRENRTATTEERAILQRYCGFGGLKCILNPAKELTDAVRWAKSDLELFAPTVELHRLIRENSKDETEYKRFVDSLKASVLTAFYTPKEITDTIADVLADYSVRPARMLEPSAGVGVFVDSMLRHSPNADVMAFEKDLLTGTILRHLYPDQKMRTCGFEKIERPFNNYFDLAVSNIPFGDIAVFDAEFQRSDSFGRRSAQKTIHNYFFLKGLDAVRDGGIVAFITSQGVLNSTKTSVRNELFSQANLVSAIRLPNNLFTDNAGTEVGSDLIVLQKNLSKKEMSQDERLMTVIQTDTKTALTDNAYFIHHPERIVHTMAKLDTDPYGKPAMVYLHEGKAAGIAGDLRRMLDEDFHYRLAMRLYSGSIRQAGTEEKVAVQNKVERPAIKLETVSSAQTVETPTEKPQPADEKPEIEPRPQYSAGVQLTLLDLWGMTEEVSQPKTSKKKKTVKKAVTAKSTPPKPKVTVTPTAPTAKPAMENKEVKAENTAKPADPDDIYATLDWDTNPPINGFYEMMMGLTPERRKELRELARQHNEKQVAEKTEVKAVPETSREQPRQEETQPEAVAAPAVTDTPSEAVGTFLFPDIEAEKPKEEVVDLSPRAYHRTPEMHLREGSLVADRGRHNIGYLKDITPYGATFQPLDLKGYQKEKALLYVSLRDAYERLYRYESLRREANVPWREHLNTCYDEFVMRYGNLNAKQNVKLVMMDAGGRDILSLERMENGKFVKADIFEHPVSFAVESHANVGSPEEALSASLNKYGTVNLDYMREITDSTAEDLLTALQGRIYYNPLVTGYEIKDRFIAGNVIEKAERIEAWMGDNPENERMPEVKQALEALKDAEPQRIAFEDLDFNFGERWIPTGVYAAYMSRLFDTEVKIAYSASMDEFSVVCGYRTMKITDEFLVKGYYRNYDGMHLLKHALHNTCPDMMKSIGKDEHGNDIKMRDSEGIQLANAKIDEIRNGFSEWLEEQSPQFKERLVTMYNRKFNCFVRPRYDGSHQTFPDLNLKGLASRGIKSVYPSQMDCVWMLKQNGGGICDHEVGTGKTLIMCIAAHEMKRLNLAHKPMIIGLKANVAEIAATYQAAYPNARILYASEKDFSTANRVRFFNNIKNNDYDCVIMSHDQFGKIPQSPELQQRILQAELDTVEENLEVLRQQGKNVSRAMLKGLEKRKHNLEAKLEKVEHAIKSRTDDVVDFKQMGIDHIFIDESHQFKNLTFNTRHDRVAGLGNSEGSQKALNMLFAIRTIQERTGKDLGATFLSGTTISNSLTELYLLFKYLRPKELERQDIRCFDAWAAIFAKKTTDFEFNVTNNVVQKERFRYFIKVPELAAFYNEITDYRTAEDVGVDRPAKNEILHHIPPTPEQEDFIQKLMQFAKTGDATLLGRLPLSETEEKAKMLIATDYARKMALDMRMIDPNYEDHPDNKASHCAKMIAEYYQKYDAQKGTQFVFSDLGTYQPGDGWNVYSEIKRKLTEDYGIPPSEVRFIQECKTDKARKAVIDAMNAGTVRVLFGSTSMLGTGVNAQKRCVAIHHLDTPWRPSDLQQRDGRGVRAGNEIAKHFAGNNVDVIIYAVEKSLDSYKFNLLHCKQTFISQLKSGAMGARTIDEGAMDEKSGMNFSEYMALLSGNTDLLDKAKLEKRIASLEGERKSFNKGKRDSEFKLESKTGELRNNTAFIDAMTEDWNRFLSVVQTDKEGNRLNIIKVDGVDSADEKVIGKRLQEIAKNATTGGLYTQVGELYGFPIKVVSERILKEGLEFTDNRFVVEGNYKYTYNNGHLAMADPLAAARNFLNAMERIPSIIDQYKAKNEVLEMEIPQLQEIAGKVWKKEDELKQLKSELAALDRKIQLELAPPTPEVAEKENEGQQLKPEAEDVRNRQAQYPENAPPQIRSPADSIVANHVIIGRPGLYAKEETRSKGLKIMNNKKKNEGQTDFSYYGLYLLDYLRTNKFEQADDTAFIRERADRAAETYERARLEGYPADGAQELAMDTLLRGLHYSRYAILREVVENEFADEVPEEKREAFVLKLLPLVGNVFSVYDLSDDNFALSSDYDLLYTELTGATVLYLDEYGVMKTIIAEKPSVAREIARIVGATKREEGYFEGGGYAVTWAFGHLVQLAMPDGYGVRGFVRDNLPIIPDTFTLVPRQVRTEKGYKPDSGVVSQIKVIKRLFDTSEHIIVATDAGREGELIFRYLYHYTGCTTPFVRLWISSLTDKAIREGLRKLEDGSKYDNLYLAAKARSESDWLVGINGTQALSIAAGHGTYSVGRVQTPTLAMVCERYWENRRFTSEAFWQLHIATDGCDGEVVKFSSSEKWKEKEPAMELYNKVKAAGCATVTKAERKEKTEETPLLYDLTTLQKEANAKHGFTAEQTLEIAQKLYEKKLITYPRTGSRYIPEDVFAEIPKLLAFIGTQPEWKDKVRAKAAPTRRSVDDGKVTDHHALLVTGEKPLFLSKEDNTIYQMIAGRMVEAFSEKCVKDVTTVTAECAGVEFTVKGSVVKQTGWRAVYGEEKEEITIPGWQEGDTLTPKGSSITEGKTKPKPLHTEATLLSAMETAGKEIEDDALRQAMKDCGIGTPATRASIIETLFKRGYMERCKKSLVPTEKGLALNSVVKTMRIADVAMTGEWEKELARIERGELSDDTFRKEIEAYTREITSELISCDKLFGSRDSGCACPKCGTGRMRFYGKVVRCDNTECGLPVFRLKAGRTLSDDEIKDLLTEGHTKLLKGFKSKQGKSFDAVVAFDGEYNTTFVFPEAKKDKKFSGRKKMAKKKDEKDVLVVRDEKTGEISVVAGLNADGTPKRTPAKAENAQSFLQFDRHGDVLDNFFKNFFRQCKEPSRFGFYRIAADQAENLLEVMKQLLKDPEANKELLAPHKVDTSDYEKKVQEEMAAQQTEKQEPQKQENMEQRKEQQQDKSEQMQGKRGYQPIDESKINWQELEDRWGVKRDNLEKSGDLTKMLNYGKSDLVKVKPTFGGESFELDARLSFKKDGEGNISLVPHFIRKEQKLDEYKEHKFSDNDRKNLRETGNLGRVVDIVDRETGEIIPSYISIDRKTNEITDIPASRVRIPERIGKTEITTQERDMLRAGLPVRDKLIERNDGRKFVTTLQVNVEQRGVEFVPGTGKSPRTAQTQETKGDTSKSQAQGGENAAQTKKEQRRNTWTNEDGSIRPISKWSGVSFTDQQKADYVAGKAVKLENVTDKQGFHATMYIKFNPEKGRPYRYDTNPDNAQQVAPSNESRTQVAVNNDGKTNEATKNLREPLQKGQTNPKDARQQQQQEKPQKKTGKGMKMMELLTRNNFEGWMQKLMERLDRQDELLLAMKAEGKQPTITESIRLFDNQDLCMLLQISKRTLQRYRSVGALPYKTLGKKTYYSEEDVLTFLSNHIKDFKKEDIAFYKARIHNFFHKMKVITMESSAYKEMMAQIANIAGYIREARDEKKRKRETEDKLLDTAQAAKMLNVSKRTMQRMRTDHRIEYVVVRGSCRYRLSEILRLLEDNTVRNEEGTIDTLFHNHTLRTGGKPKGRRTMNMEIVSIEKKTFEMMVAAFGALSEKVAALRRKSDTGRMERWLTGEEVCGQLRISPRTLQTLRDRRLIGYSQINRRFYYKPEEVKRLIPLVGTLYPHGRMMNENNDVFTMEDEPIASVVQDMRKGSKWLSAFLESYRPPLDGERYLTDGEVSELLRVSRRTLQEYRNNRVLPFILLGGKVLYPETGLRGVLEANYRKPLEMKRDTIIIEDKAVSVTGNDVWMTATEIAGLFHTTVPAVNAAIRAVRKSDVLNDYEVCRYMQLENGLHADVYALEIIIPVAFRVNTYNTHLFRTWLVGKALSQEKRQTYVMFIQNGKAGYCMKSTFSVIYYLKRQVVKKDGTVPVMGRITVDGSQTQFSCKLTVDPKLWDTKGGRVTGRSTAALETNRMLDKMRVRINRHYQEIMERDNFVTAEKVKNAFLGLEHRYHTLMQVFRQHNEDYEKQVEAGMKAKGTLLKYRTVYKHMQEFLDIRYHVKDIALKELTPAFISDFEMFLRTDKHCCTNTVWLYVCPLRTMVFIAINNEWLTRDPFREYEIKKEETTRSFLTKDEIRLLMEGKLKNAKQELYRDLYLFCAFTGLSFADMRNLTEENIRTYFDEHEWININRQKTGVVSNIRLLDIANRIIGKYRGLCGDGRIFPVPHYNTCLAGIRAVAKRCGITKHITWHQSRHTAATTIFLSNGVPIETVSSMLGHKSIKTTQIYAKITKEKLNQDMENLAARLNGVEEFAGCTIMGNPTKKLPLIERDDWLLPVERELTARYESYLRALREIEKSAGSIVDYANGYRYFGWQRDEALEGWWFREWLPGAQDVYLLGDFNGWQRTSLRLDRNPEGVWSIFLPDAMYAERLTHGSLYKIHVHGDNGWHDRIPAYATRVVQDEKTKDFTAQFWNPSPFDWQGDRPIAARSEELFIYEAHVGMAQEREGVGSYAEFTEKILPRIREEGYDTVQLMGIAEHPYYGSFGYHVSNFFAPSSRFGTPEALKTLVRTAHELGLAVVMDLVHAHYVKNLNEGINELDGTDHLYSLPGTAGEQPYWDSKTFDYGKEQVRHFLLSNVKYWLDEFHFDGYRFDGVTSMLYRHHGHTDFVRREQYFDEEVDEAALTYLTLANTLVHDFRPRAVTIAEEVSGMPGIAVPTADGGVGFDYRLGMAIPDFWIRQLKEIPDEQWDIHAIWHVLTDRLPGIKTVAYAESHDQALVGDQTLAFRLMGKEMYEHMDRASQSPVIDRGMALHKMIRLVTISAGGDAYLNFMGNEFGHPEWIDFPREGNGWSYAYARRQWSLADNGLLRYAQLGEFDRAMIALVKKYGILRDGYPYNLQMDTQNQTMAFSHGDLLFVFNWHPSASIPNYEVRVRVPGRYRPILSTDERRFGGTERTDMRGQHFSYPVQGDELPRIRIYNTSRTATVFLREEMTKKYRHLLFDLDGTLTDPMEGITRSVQHALRHFGIEVSDLRELCPFIGPPFAESFRTFYGFDDRQTSEAVAVSREYFTEKGIFENRLYDGMDELLDTLTSSGYTLCVATSKPRVFAERILDHFGIAPYFSFVGGTGLDGSLPTKADVIAHVLAGSNITDRGTALMIGDRKYDILGAKTVGIDSAGVLYGYGDRAELEAAGADYILPAIPDLEELLLEMELLFTNCTILPMTAEKEPRTFTGAVGVADRRLALVSDDPRRIEAFRREHPGVREIDGTGKVLMPGLINTHCHVAMTLQRGYADDIALMKWLHEYIWPFEAQQTPDEIVLGAEMGIVEMLLGGVTTFVDMYWHENRIAEAVRRLGIRAMLGASYLDTSWEAFADDVERMIATTGDCDRIRLAVAPHSPYTCSPESLQRGKELARRHGLWFMTHISETEDEVRIVRERYGTTSVRHLDTLGILDDRTIGAHCVHVDDGDIRILRERGVAVSHNPQSNMKISSGIAPIARMHSEGVLCTIGTDGTCSNNDLDMWDEMRTASFLQKVATMDPCVLPAYEILKMATVNAARAIGHAGELGVIKEGALADFILIDAVKPHLMPVYNMVANLIYCGKAADVDTVVVNGEIVVEGRRIEGVDLSNLCFQVQHTAEDIARRTAAAKKMIRTILLIAASCLAWLGAGAQQYEGAHLKFESSFHNFGSVPRWGGDLVWEFEYTNDGSAPLVIVRAQTTCSCLKVSHSKRPLAPGETAVIRVVYEPHKNEPGTFSKVIQIYSNSVSGRELITVCGNSLDTEMYYYDPNNDKSNARRWASLAALLYALSIAAAFLFVSFDMGRDELLPGEGLLIDFGTTETGLGDRDLSATDVQAPPQQAAAEASRQQVEYVTSEREEIAVQTPQPEKKPRERETPGQTPQRSDAQQPAEQPRTVNRRALFPGRTAGSTSTSEGPAAGEGNAGDLSGAPEGSHDGTGQSDSGIAYDLSGRSVVGKLPKPSYPGNESGKVVVDVTVDASGRVTYASYRAQGSTTNSKRLVDAAVEAARKARFSSSESLMQTGTITYVFTLEMAIKRGSKVDKSFSSASMTDLIFLLLLFMLIATTLINPNAIKLILPKSSNQLKDKAMTTISIQDTGHGYRYYVETENVGSREGVEKALKSRLAGQENPTVSLHCDKSVAFDEVVAMMRMAKANNFTLIAATSPEMISLLQTADAVVVAEQTRMGLWQLFMSGGWLMWVLLILGGLTIFIFVERFMAIRKASEFDMNFMNRIRDYILDGKVAAAVDLCRKTNTPIARMIEKGIGRIGRPMSDVQSAIENVANLEVSKLETNLPILATIAGGAPMIGFLGTVVGMVQTFMDMAAAGGTVDMSLLSSGMYVAMITTVGGLLVGIPAYFGYNYLVARIEKLVFRMEANSIAFMDILNQPVQKMRRIVNILAKMVSAIVLALIFLPLLVALLFEIPAVQNFVAREATEIISRKLGTRISIDRVDIGLFYRVSLDGFYVEDFQRDTLLYAGRLDARIKSLGLFGGGLVFSRAELSDARFCLRETPDGEMNIKQVVDKLSKKDKARAEGKFRLEIERLETDGLDFSMERLEHRNPSYGVDFADMHLIDIRAELKNFTIDGPVIHTDIGRLAMRERSGFVVEDLAGCLCIANGCIDIREGHIRTAKSNIELPSLSLIGLDWALYKNFVEEVDITAQVVNTTLSSDDIAYFSPKMKDWHLTLTDVNADVSGPVADMSGSLRSVRTGADTKLSVDFAAQGLPDVGKGHFKADISELTTSAADVDRLAAALTGKNLPDEVLRIAKNAGKIGLTGKFDGTLTAFAADAALATEIGGATCLLQVSSLRDGCRGVLGDVKTSSLQLGELLENDLLGPLSLNVHVNGELSSEHSDAEVSGEILRLGINGYDYDSLRMKGHLVNREFNGLIEARDRNLRFDFRGLLDLNDEQRPRYDFALDLEEANLAALGVNRRDSVSVLAARIAARAVGRTLDDLNGIIFVRDVSYRYNDRELAADSVVIVGRNSLSDKFIRLRSDFVDADYEGKTSYKEVFAYLQQRFRDYVPTLDGGPGWQAQHPDTVELADGYSQLTVNVRKINPLVNAVSPGLQIADGSRLLLRINPANDKLSFEAASDYIERGRMLVTRLNLDAHNRGDSLVFAASTEDLYLNSFHMSRVGMSGGAKDNKLELITDFADTIGDVSGRIGFRSEFARGRGPAGRQIDLRLTPSYISRGEKTWNIYTDGITADTSRIRIDRFRMVNAGQQLLLDGVVSRRLQDSVQLTLHNFELAPFSQFTSSMGYRVDGRTNGSATMKAVLGAGEVQADIVVDSISINDLAVPSIWLRSRWDFIQNRAGILVQQRENLDTLVRGFYAPSQKRYYARATLDAVELSALDPLLKGVVERTGGNADVDIALRGSGKEANLSGQIAVRDFTTTVDFTQVTYTMPRTVIEVKNNHLIAEGVPLYDPEKNEGLFSIDLNLEHLSNISYSVKVLPKELMVLNTTSKDNDLFYGRIFASGSATIAGSKGGVKMDIVATTEGDSEFYMPLSGQSNAKTADFVTFVTPEQIDTTDYLVRKKLLFQQQGRKKEAAGSTMDITMALNVQDNTAFQLVIDPTVGSALKGRGNGMLNLHINPGNGIFNMYGDYTLIEGSFLFSLQNIITKKFIIESGSMIQWTGEPVDARLDINAVYKLKTSLQPLLNTVTASSDDDQSGSRISDRSVPVDCKIHIGGRLSNPQLDFSVVVPVTDIETQAAVASVLNTQEAQAQQFISLVALGTFSNSGSANIGASSGVATGLEMLTNQLTNWFSTDDYRIILNYRAGSEMTGDEVDFGFSTNLINNRLLVEVEGNYIIDNKQAVSNNVSNFMGEAHVTWLIDKSGNLRLKAFTQTIDRFDENQGLQETGIGISYKEDFNNFKDLKQRIRDRFTNKKRQKKRQARREEQARRAAEEAQRQELLLPEDPPEPEYDLERDMSVFISGGSRYRVSVRVSEKLRNAIGNRFAVLYCTGHRFLPVVAGGLRGKFFERMGTCSHFSEVHPIQDYVKDTNKPSAKANLFVFFRGGIIRIKIKDTEMDITILGIESSCDDTSAAVIRDRTLLSNVIASQAVHQKYGGVIPELASRAHQQNIVPVVDTALKEAGVTIDKIDAIAFTRGPGLLGSLLVGVSFAKGLSISHDIPLVEVNHLQGHILSHFLDLPDRQLPHPDFPFLCLLVSGGHTQIVKVDGPLDMQIVGTTIDDAAGEAFDKCAKVMGLPYPGGPVIDKLAKEGDPHAFRFAKPRIEGFDYSFSGLKTSFLYTLRDEMAEDPNFIEKNKADLCASLQTTIVEILLDKLVKASKEYGIRDIAIAGGVSANSGLRNGITEEGRKRGWRTFLPEFKFTTDNAAMIALAGYYRYMNGNIATLDIAPVARLEELELTVAPTAEQMNLYFSFLSVRRARRSCRIVCRFGFFVSFSLSGCFDRFQVFPKGGSVRGEWSFLMKTLKIGDLLARLPIIQGGMGVGISLSGLASAVANQGGVGVISSAGLGVIYREHSKDYNTASIWGLREELRKAREKTKGIIGVNVMVAMSNFADMVRTAIAEKADIIFSGAGMPLNLPSFLTKGSKTKLAPIVSSARAAKLICEKWLANYKYVPDAIVVEGPKAGGHLGYKPEQITDEHFSLERLLPEIVSEVRRFGTAHDTHIPVIAAGGIYTGEDIYRIMELGADGVQMGTRFVTTEECDASTEFKRSYIEASQQDIEIIQSPVGMPGRAIHNSFLERVKQGLKQPKSCPFNCIKTCDVTHSPYCIIMALYNAFKGNLSAGYAFAGVNAWRAEKIESVKELMTNLIDEFDRFSLKKQLAKLKKMAERKCFGFFEPLFCIFFQQVLKIVRYLRNLPKRIYSKTAFKMIEFRPALLTSLKHYSREKFTADLMAGIIVGIVALPLAIAFGIASGVSPEKGIITAIIAGFLTSALGGSRVQIGGPTGAFIVIVYGIIQQYGIEGLTVATIMAGVFLILLGLFRLGTIIKFIPYPIVVGFTSGIAVTIFTTQIKDLFGLTTPEMPGDFAGKWMVYFQNFGTIDLWATAVGVISVAIIALTPRFSKKIPGSLIAIVVMTLAVYLLKRYAGIDSVETIGDRFTINSQLPDAVIPALSWEGMKGLLPAAITIAVLGAIESLLSATVADGVTGDKHNSNQELVAQGIANVVTPLFGGIPATGAIARTMTNINNGGRTPVAGVIHAVVLLLIFLFLMPLAQYIPMACLAGVLVVVSYNMSEWRTFRALMKNPRSDVAVLLVTFLLTVIIDLTVAIEVGLVLACLLFMRRVMETTDISVIRNEIDPGKESDLESHEEHLIIPRGVEVYEIDGPYFFGIANKFEEQMVQLGDHAQVRIIRMRKVPFIDSTGIHNLTNLCRISQQENTRIILSGVNPKVHEVLHKAGFYSLLGEENICPNINAALRRAKELVVEPKEKMQNKNTVSIGIGKGHVKMRGPDKSGPRIFFTSENNNKQRLFFMKKLFFASLWVLACLTAACSDEKDEPNGESGSVVGEWVFQKNEYYRNGKMIDSFTAVEDEDKMIAVFREDGTFRYYDFPPEEYYDGTYSYDEASGVLVTDDGIEKQSCRAEITVSEMKWIYDEGNDEMLVEYYTRKMISNFKNTLELTQRRELEELKRRESQPIVVEPYLCKFELDRWDQVIFTFKADLRNVSQSTFIDAEFYEEYIAGEDWVGEPYIRDRLAAWVSFYFNKEYVLRRDEGMFSRYECMFPNVSFDNPWKPQETKSFEVVMSIYDDDAVTKGFTAFDVKSCILHFNLTVEDPDGRKIPMKMKFDLADVWKDFIDKMKSFIYRYILYLTVVPFISCNSDLRIEGTYDFADSNDPMKSIIISEADQTGFVSIYYVMESPYSSNAEQIIFAQDRSKPDRTSDGGLLLESEWGQLIFEKPQSFVFVISSGTEINFGNAFSITALYGEQAPRVPQNVTFRGGMPDGLTVCPKCGLVKGGFDELPKHTADGLEIARVEQKVKVEIPFILYLGTVCSIILLAIVVYIYVAIKLMLTGADSTHLQKRKAWSRSFIHQEAFGVARKQINNTPVYREPIMKKMILCCLVAVLGCGVFAVEAKTPQKKGEIVTTVFTVDIDCESCAARIMNNVPVIGKGIKDIQVDVPSKEVTVTYDSAKTSPEELIKGFGKIRVKAEEKPVKMKFKYLAVLVFFVASAFGAARAQNVKGVVYGADTDEPLVGASVYWAGTTVGTGADAEGNYTIHRVKGYDMLVAGFVGYTSDTIRVESGVERVDFRLSNEGVELEEVVVNSTLGGNYVKRDGILKGEMISFAGLCKMACCNLAESFENSASVTVGYSDAISGARQIKMLGLAGTYTQILDENRPIMRGLSAPYGLSYTPGMWLNSIQVSKGISSVTAGHEAITGQINLEHRKPTDDERLFINFYLDDELRPELNLSTALPVTKDKKLSTILLLHGSLDTHLLGDMDDNGDGFMDLPKTRLGAVANRWLYTADNGAQVRWGFKYLAENRLSGQKHYKASMREEMDTDWDKGAMYGSQIKNRELNAYFKFGMPVGPGVYDEDQQDELRSNIAFVADYDRFRERAYFGLNDYDGTDNMVSLNMMYNHYFSFRHSLIVGVQSHLQFLDESLLNPTPWLDAAGAWNLDRQENEVGAYAEYTYTIKDKLSVVAGIRGDYNGYYDKFYVTPRGHIKWNITPTTILRGSAGLGYRSTNVITDNIGVLATGRHITFERPTAFSAGAAAVRGPLNPGSAYGGYTTWMVADGGAGNFKALNRMEKALTAGGSLTQIFTLVKEEDATLSFDYFRTQFYNSVIADQEYSPNDIYIYSSDKRSFTDTYQVDFSWTPVERFDIFATYRYTNSRMTIDRPDGSTALVERPLVSRYKALLNLQYSTRYNRWVFDVTAQLNGPSRLPTQTGDLADSEMSPTYPMFFAQVTRKVGKFDIYVGCENILDYKQKHPILNADDPFSAGFNSSVIWGPLMGRKFYAGLRINFYMSVWMLLVAYCFSVGAAAYAVLSCHCLERERGEVHICCRGCDIHTECDSHSVSFKAVCCGVDHSKASELYTSVSSSQWERDTKVMIVDLPAILAAEMTAIPFDSVHWATVSERLCLAHSTVHLLSSGLRAPPVFVMRIKEEYKVREMAGEHIVVMQGRYGVDMTKVIALNETSLWLWNRLQGREFGIDDVRDLLLGEYDVDAETAARDAQAWVARLKTCNLVEEMYMESTAPNRRQQIAALLKRYWGFDTFRPVQEQVILSVLAGRDTLALMPTGGGKSLTYQIPGLASEGVCIVVTPLIALMKDQVDRLRKLGIRALAIHSGLSARQIDIDLDNCVYGDVKFLYVAPERLASEAFRLRVQRMNVSLLAVDEAHCISQWGYDFRPSYLRIAELRERIPGVPVLALTASATPRVADDIMEKLHFTEPHLLRSDFSRPNLSYAVRHTDDKNEQLLRIIRNVGGSGIVYVRTREGAEQVAAFLRDEGISAEYYHGGLGHAERSMRQDAWISGRTPVMVATNAFGMGIDKPDVRYVVHYTMCDSLESYYQEAGRAGRDGRRSYAVLLISSDDAGRIAKRFEADYPPLEKIRSIYEKICSYLQIAIGDGAQSSFLFNLRDFCTREHLYTGLVQNALKILSQNGYMTLLDEAANPARILFCVSRDDLYRLRVIRDDLDHIIRVLLRLYEGVFTDFRPIDETEIATWSGYTPEKVHDLLKRLWQLRVIRYIPSNRSPLLYMDEERLPTADLYISPESYQQRRKQTRERFERMLAYATAETGCRSSFLEAYFGVPEPRECGICDLCLARKRAARAPQAEASKKTVLELLRNDALDPREIVAALRSDPAQIAELLRKLSGEGKISILPDGKVTINRMRDFMNKPITFQNSISNEEAALLPAIEFRGPIVVVDSEPRLREACRYLAAQPVIGFDTETRPSFRAGVVNRVALLQLSSPEQSFLFRLCKIPLDKAIVKILENKEILKIGADVKGDLRALHNIRHFQEAGFVDLQELAGEWGIEEKSLRKLSAIVLGQRVSKAQRLSNWEAAQLTDKQQLYAATDAWVCTRIYDRLLHTPKPKKTKKMIPQIHLRRGKEESLLRRHPWIFSGAIESVRYDGNEIPEGALVDVYTRSGDFIARGHYQIGSIAVRVLTFEQEPIDAAWWQRMISTALDVRRTLGLTDAPDTTCYRLVHGEGDSLPGLVVDIYDTTAVIQCHSVGMYHARLTIADAIRTVYGDRITAIYDKSSQTVPFKAGLNPVDGYLYGKTGGMPRTVLENGEKFLVNWEEGQKTGFFIDQRFNRELVRRYARGRTVLNTFCYTGGFSVYALAGGAREVCSIDSSERAVALADANVRLNFGEEAPHTSLAVDAVEYLKDIGDRYDMIILDPPAFAKHHKVLGNAMQGYKRLNARALAQIKSGGLLFTFSCSQAVSKELFRTTVFSAAAIAGRKVRILHQLTQPADHPINIYHPEGEYLKGLVLYVEMERETIVREFLDRHKIRYDIYHHPASPTIEEAKAHWREDGSKHCKNLFFRNHKGDRHYLVCFDCDRSLAIHDLEHRLRQGKLTFASPQRMERYLGLEPGSVSPFGLINDAEHHVHLFLDRHLQTCDSLSFHPNDCRATVVISRPEFERYLSLVGNTYEYLDLYDMLRGILKEFRLRMDKKSIAGIVIVALIFLGFTFYNSHQQKKYQEQLMAYNAEQARIQAEQDSLLALNAPLPTADSAAIAAAGERLSGDSLQAQRRIMQFGELLAAAQQAEAEEFTVENEVLKIDFSTRGGQVKDVTLKDYTKYAPRDERNQPVRLFDPATANFALTFYVKNGHNNVLVNTADYTFNLVSMEKDADGAQRITMDLPVARDAVLRYEYVVYNIQSPARDYLVDLNVYLKNMAPQMASQTTIGIDWSNRSYQNEKGFQNENTYTTIYYRAPGESSADDLGISDGEKQKTVSSSLNWVAFKQQFFSSVMIAPENFSYADMKFTTAEKGSGYIKDFSAKLTVPYTAQTDHYNFAFYFGPNKYAILKHVATTEGDDELHLERLIPLGWGIFGWVNRWFVIPVFDFLRQFIPSFGLIILILAVLVKVIISPLTYKSYISTAKMRVIKPEVDELAKKYPRQEDAMKRQQATMELYKKAGINPMGGCIPLLIQMPIIIAMFRFFPASIELRGQHFLWADDLSSYDSVLSLPFNIPFYGDHVSLFALLMTVALFAFSYINYQQTASSQPQMAGMKFMMVYLMPVMMLLWFNSYSSGLTYYYFLANILTIGQTLVIRRMIDDEKIHAVMQANAAKNKNRKKSKFQLRYEELLRQQEEAQRNASRRKMKLSKPKYIFVTGGVASSLGKGIISASIARLLQARGYSVTIQKLDPYINIDPGTLNPYEHGECYVTEDGAETDLDLGHYERFTSITTSHANNVTTGKIYQCVIDKERKGEYLGKTVQVIPHITDEIKRRIQLLAQRKEYDVIITEIGGTVGDIESLPFIESVRQLRYQLGARNTALVHLTLIPYLAASGELKTKPTQHSVKTLLENGLQPDILVLRTEHPLSAELRRKVALFCNVDANAVMESIDVPTIYEVPLVMHRQHLDEVVLSKLDLPSEQEPDLSSLQAFVDKVKNPKRTIDIALVGKYTELPDAYKSICESFIQAGAVNDCKVKLHYVNSEKIDASNVGEKLGKMAGILVAPGFGNRGIEGKIEAVHFARTHRIPFLGICLGMQCAVIEFARNVLGFKDATSTEMDPATKHPVIDLMEEQKGITAKGGTMRLGAYPCSLVPGSKAAQAYGTTQIQERHRHRYEFNSEYLKDFESHGMKAVGANPDTGLVEVVEIPDHPWFVGTQYHPEYKSTVQRPHPLFVAFVAAALAGKDDKKKMATENSTLPVSGEHLDSSVVEDTQNNSVPADGGETNAAVADDTDVPTQSRVDFADEDAALAAENAGLDLGEASPEEEAAGGDAAGSDLAGKSKEELLAIFARMLEERPVQSLRRDVEALKIAFYKLRRAESDAARRAFVEAGGAEGEFVSEPDPAELRFKDLFREYRRLRDEFVAGLEAAKEENLKIKLQIIEELKELASSDEMLNQTFNKFRELQHRWKETGVVPQQNVKDLWETYNLHVENFYNFIKINKELRDLDLKKNYEQKLALCEQAEALVLEPSIVEAFHKLQKLHDEWREIGPVANEYKEVLWNRFKEASSRINKQHQEFFENIKQEQLRNLELKSELCVKAEELAQQPLTSRKEWNKASEKLFEIQKVWKTIGFAPKKDNNAIYERFRNACDKFFEAKRAYYAGLKGEMEHNLQLKTELCEAAEALRDSEEWKKTTDELIALQAKWKQTGAVSRRYSDQIWKRFRAACDAFFERKSRHFAAVDDQYGENLRRKEALLEEMAAADILAGGFEMIRDFQRRWGEIGFVPIKQKEAIQKRYKEVVDKMFDTLRGSERDRSMDRFKEKVSSLKASGDRRLRTERDRLYNKVRQLEQDIALLENNIGFFSKSKNAEAMIAEVRAKIERAKQEMQAAIEKVKLIDQEENKEMSHRILLVDDEDDILEFIRYNLTKAGYEVYTARNGAEGLQQAAAHRPHLILLDVMMPTMDGIETCRALRCDPALKETMVVFLSALGEEEQQLAGFGAGADDYISKPIKPKLLISRIQAILKRVAADKPASLVIDRERHLVIRNGERIELPRKEFALLALLASSPGKLFSREEIYSRIWGDGVVVGDRTIDVHVRKIRQKIGDGHISTVKGMGYKYENMIREIVAVGIGGALGSMSRYLVSYVWLAEQSLLGFPAGTFTVNAAGSLLMGFLLEMLGAGTASWLLSVGFCGGFTTFSTFSSDVVRMLKSGDYTAAGLCIALNFAACVCCILLGAALGRLLKRMVILVLNCGSSSIKYQVIDMEAQSSKLLAKGLVERIGLPEGDLTHKPVGKEKFELHQPIPDHTTGISLVLQALTDPVHGVIRSLDEVKAVGHRVAHGGEFFPESCLVTKQVQEKIRSLFQIAPLHNPANLEGILSIEKVLPGVKQVAVFDTSFHQTLPATNFMYALPYEYYQKYGIRKYGFHGTSHKFVAREGAKLAGLDINNSKIITCHIGNGGSITAVLNGKSYDTSMGFSPVDGLVMGTRCGNVDPSAVTFIGEKEQMSYAEVNNMLNKQSGVFGVSGVSSDMRDIDKAYEEGNPRAILARDMYCLRIKKFVGEYAAEMGGVDLIVFTGGVGENSPETRKEVCEGLEFMGVHFDRKINEGLRGENKIISAADSKVKVAVVPTNEELVIATDTYEIVNKMQHLSEIVEEARKKGKKRLAVAYGQDAHTLAAVYAAYKEGLVEPILFGDPKIIEQVCKEENIDCNIFKIIPESNDVKCVNLAVNAVVTGEADVLMKGLVSTDKYMRGILNKDAGLFPPKGTLSHVAVVEMPNYPKLLVISDVAVIPQPDFKQKTILIGYLTRIANLIGIKTPKIACIAPSEQLLPSVLSSTEAALLAKMGDRGQLGNVVIDGPLSLDVALYKEAAEIKKVKGSSVAGDADCLLFPNIESGNVFFKASTHMGGGEIAAMVMGTKVPCVLTSRGDSSLTKLYSIALACLAAKMGFKILAINPGSTSTKIALYDDEQPTLALTLRHSAEEIARFPRIIDQLDWRKEMVLEALAKNNFDVKSLSAVIGRGGLIKPIESGVYEVNAALKNDLVNAQREHASNLGGLIAEQIAQAAGVKAYIADPVVVDELDDIARLSGIPECPRISIFHALNQKAIARRHAEKVGKRYEDLNLVVAHMGGGISVSAHCKGRVIDTNNALDGDGPIAPERAGTVPAGALVNLCFSGKYSQRDVLKMLAGKGGLVAHLNQNSVQQICIDIEKGNQKSKAVLDAMSYSIAKEIGAMAAVLKGQVDAILLTGGVAYNEPVNDVIREHCSFLAPIFIYPGEDEMGALMLNALSVLRGERTPKVYAMGGELRDKVASGVAWSIAEKVGSMLLQMGVSIVILRLLTPEQMGIMAIPVVFSSLALVMVDSGFSQTLIRKAVPSEEDYKSVFVFNIAVSVLLYLLLVGAMPWIARFYGMPELVRIAPVLFLLVPLNALCVIQNTIFTRQFRFARLSKVVFTSSLVSGLVAIGMAWAGCGIWSLVGQRVVAMGVRAMLLWGLSDWRPRAAFDAGCLRAMAPYSFRLLATDLISSVYNNVSQLFVGKLYAADVLGFFNQAQKLKELPVTSTMQAVQSVTFPALSKIADDERKFAESYRQVVMIVAFVMLPMMAGLIVVAPEMVDSLLGEKWMPMVPYFQVVSLAGMFAPIATVSNNVLKVKSNGRIIVRLEVVKKVVMTLVLILTIPHSVLAVTWGLSAMAFFEMILNFGATTRYAGLTAGRFLRTLLPIASATAAMFGVVWAFGHFTSFAPLPTFLLKVAVGVVCYAGFGALFRLEAMRVAWELVKKLFRMWGEKKTKIVATLSDFRANEEFVRGLFEAGMDVVRINSAHVTEEGAAKIVEAVRRVNPAIPVILDTKGPEIRVTAVADEYGGAIGFQTGERVKVRGTADGEPSTRDTIYFNVATVVRDIAVGARLLIADGELELRVTDKTDEELMCEFVRGGTLRSRKSVNVPGMKIDLPSVTEKDRRFIEWAVKNDVDFIAHSFVRSAGDVHAVQEILDRYDSPIKIISKIENQQGIDNLDEIVEASYGVMVARGDLGVELPAEAIPNAQRRIVERCIAAKRPVIIATQMLYSMVRSPRPTRAEVSDVASAIYERVDAVMLSDETAMGDYPVEAVSTMSRVAREIEKDETHFTPMIDMNMVSVNHEITAQLARSAVRASTNLPIRYVVLDTATGRTGRYLAAFRGRCQVLAVCYTRHAQRILALSYGVVPILREQQSHERYQDRYHFVIDALDFIQRKHAIEPTDLLAVVGGSFDSKYGASYLEISSAERFRERDAVCDGCMFSGFSARRSVRFRITTEDIRNDASSVCRVLVRKGLVRDRMAEKLRIEADSGFQVMFLKIAEPHPVFCKDSQSREDTKIYFRRPGRPDFRTGVKCVMRSAYSYLCYIPDFGRVRSIYPNAAAPHKPPFDMTEFGLIDTIRDMFAAIPRNGFDGIGDDCTVFPLGSGESLVFTADLLAENIHFLRRATSARELGRKSLAVNLSDVAAMGARPIATLLSLAIPHDLPEGWIEDFMEGYRDLSAQYDVGLVGGDTTASDSGLVVNVTAIGRIADSHIKRRSDARPGDLIAVGGSLGESGAGLRDILAGRYDTPLAQIHRNPAPQVAEGIWLGERPEVHAMMDISDGIASDLRHILHQSGVGAEVDTECIPTPVDLETAVSGGEDYKLLFTVAPESANTLLSNYRLRFGDEFHFIGRITGGNHLEWLRNGTPLPVDWQGFRHYMQIRSASPAAIFPLQALEIPAIHRKLSPKRSRLLPYDIGTVRRKKMQLKLDKRFWVVITCIIVVFTIFIVGRNLLHAIEIRKDIAILEQERAIYRARIEQDSTLLEELKYDDNLEQFARERYRMQRRGEKVYIVEMKEATNYDLLDGGRKLPLVEDFYTIQGEGFHTGKPAYFIRLGGCDVGCRWCDAKYTWNPKLYPPTDISEVVRRATSCQAQAIVITGGEPLLYPLGPLTSALKGHGLKIFLETSGSHPFSGYFDWVCLSPKRQQPPLPEAFWRAHELKVIVEREADLQWAERNAEQVGRECKLFLQPEWSVSEEIMPLLVEYVKAHPAWNISIQTHKYMHIPMKENVIKLHDKKFKVMIPAAKIEEAVAAVAAKINEDYREKRNPLFLGVLNGSFMFMSDLLKKIDFNCEISFVKLSSYCGTSSSGDVKCLIGLGNNIEGRDVIIVEDIVDTGASIEHMVEELKTKKPASIRVCTLFFKPKAYQRQIPIDYPAMHIGNEFIVGYGLDYDQLGRNYKDVYVVTEMLAKLIRRIKCCSVQEILMIVSIIMLLIVIANRTSAGIKARSASSGQITQHQKQAAPPQEMTFNFCLNLFLAEKPRNATCKKSGAKKPILLIFKAFILPIPIQQDAKWKMIFQQVTIGSNTLPDSQRPGAPVIGDNVYIGAGVKIIGGVKVGNNVRIGANAVIFTDVPDNCVAVVNGVRTIHKSEPLDNRFMPISKLKESEMELSYFAIIIGAIFVNNVVLAQFLGICPFLGVSSKVETSLGMGAAVTFVMALTSVVAWSIQTYVLVPLGIEYMQTIVFILVIAALVQMVEIMLKKVSPSLYQALGIFLPLITTNCAVLGVAILMISKEFNLLQSIVYSVATAIGFALALVLFAGIRERLELEDVPKAVQGVPVALITAGILAMAFMGFSGLVMKVLASGIIKNNPTFVLVLGMCPTLGTTTSAENGFGMGVATMAVLILSNLVISLIKNLIPDKVRIPAFIVVIASFVTIISMLMQAYVPALYASLGVFIPLIVVNCIILGRAEAFASKNGPVASIFDGIGIGLGFTLSLTLVGAVREVLGSGAIFGYSFGITDYMPLVFVLAPGAFIVLGYLMALFNKFLKKMKSTLFNMVMVLFVITLLASAGVGAVHMITEEPIAEARVKATREALKQVLPEFDETEDTALTVENLPVTVHTASEGGRVVGYAVESMTKNGFSGVIRLMVGFAPDGQILNIRVLEQAETPGLGTKMVGAGNPLEKSFVGRNPAQMKLGVKKDGGDVDALTAATISSRAYVDAVSRAYKAYCEKAGVEAAVNTVSGASNTQNASADGTSGASATRDAGADGASGASNNQETGTEAATGATAARPNAEAGTRAAGEERYRERGLEREGRSNRLQRGSQTVNNAQEGGRNEMANKLIVAPAPHVHGSESTQKIMRDVLLALTPALVFSVVAFGWSALAVTCISVASCVLFEYLIQKFLLKGPCTVSDLSAVVTGVLLAFNLPASLPWWIVVIGAFVSIAIAKMTFGGLGKNPFNPALVGRVFLLFAYPVQMTTFPRPVGQLADAFSGATPLAAVKAELVSHTSVNYQDVLFGSIPGSLGEVSALLLLVGAVYLLWRKVITWHIPVAVLGTMAVFVFLVGLGQGMHGEALWEFPLFHLLAGGAILGAVYMATDYSTSPMTHTGMLIYGVGIGIITVLIRLWGAYPEGMSFAILIMNSVVPLINKYVKPRRFGLKMKTFPRGGVHPSDNKLSRAEAVEVLALPDVVNVPLSQHIGAPAVAKVAKGDKVKVGELIAEAAGFVSANIHAPVSGTVTGVDMLPNGQGIRQMMITIRREGDEWAEGIDTSKELVRECTLSAPEILARIKEAGIVGMGGAAFPTQVKLTVPAGKKVEHLIINGVECEPYLTSDHRVMLERSEELLVGVTILMRALGVSGASVGIENNKPDAITRLSRLASSYPGIRVVPLRVRYPQGGEKQLIAAVTGREVPPPPGLPIDVGAVVCNVSTTVAVYDAVQKNKPLIERVVTVTGRQVEAPKNLLVRFGTPVAVLLEAAGGVPAGDVKVLNGGPMMGRAMSNLASPVVKGCSGITVLGGAAALRGRESSCIKCAKCVSACPMGLEPYLMAKLSRRKLWERLEAEWVTNCIECGCCQFTCPADIPLLDFIRMGKQEVGALIRARAAAHATKKMEVLLYTVLTLCVLGILAALILYFVAQKFKVEEDPRIDEVEKMLPGANCGGCGFAGCRGLADALVKRADISSLFCPVGGAEVMKTVAAYLGKAAPEKEPQVATVRCGGSCEKRPRINAYDGVTSCAVAASLYGGETGCTYGCLGYGDCVTVCNFDAIAINPETRLPEVDFDKCTACGACVKACPKSIIELRKKWPKQRAVYVSCVSKDKGAVVMKACKAGCIGCGKCEKVCPFGAITIQNNLAFIDSWKCKLCRKCVNECPTGAIRLVGMEPLPKEPKAAPASKQTSAAGEKPASEEKKTEKTESMDRIEHSGVVKRVDAERVCVEITAHGACGSCKAREACGLGETGQKIVEIRTPAAATYRPGDRVTVAITRRTGAVAVLLAYVVPFVVLIGVVAVCYLLGAGDGAAVLAGLGSVVLYYGILWLLRRKIDNAIHFTISEMKIALAQLNYTVGDVAGNTNKIIESVRRAKAEGADLVVFAEQAISGAPSFDLLRKNPFLEQCEDALMRIAAECDTVDAIVGLPILTKEGTISAAALIQQGRVVRYVGKQNITVRRELGFLTPSKGCEYVTIRGCRCALVVGDDLFHTPDFDKSVETVINIHARRYRKGDLSRRYDVIRNIAYVKGKNVVMVNQVGGATELVYDGMSGVMDNRGKLVRLLKSFEEDFQVFDTENPACSVESVPVSVNDRTRFIYEAACCGLRDFFVKNGYKKACVGVSGGIDSAVVACLAVAALGAENVRGLMMPSQFSSEGSVEDAKQLAENLGIEFHVVPITEAYRSIVDTLIPVIGGTDFDATEENIQSRIRTLMLMALQNKNGYVLLNCSNKSENALGICTLYGDTGGAFSVTGDLYKTEMYDLARYINRKFGAPIPENILTKEPSSELRPNQKDSDMLPSYEVVDAILYRLIEDGQSREEIINAGFDSDEVQKIYAMVMRNEKKRFQYPPVLRLSSSSFGHEYRMPLTHKYVKMATQKKTAEVDYSMQEKILALYDLQKIDSQIDSINKVKGELPLEVQDLDDELAGLKARVENINAEIEELNALSKQRKREVDQAKILIGNYKEQQNNVRNNREFDAISKEIEYQELEIELAEKRLKEYAAGIKVKKAQVEETEALMTERRKDLEAKQTELQSIEAETASQVAEFTAQAAKAQAKIDKRLLEAYQRIRHNVRNGLAVVTVRRDACGGCFNRIPPQRQMEIRQGKKIIICEYCGRILVADPEEQQMKIRDIAEVIERYAPLRLQESYDNAGLIVGRPEDEVHQALLAVDVTEEVLDEAEQTGCDLIVTHHPIVFHALKRFNSASYVERCVERAIRRGIALYACHTNLDSAPGGMSWRLAEMLGVEELRVLQPTDPADGRVGFGVVGELPQSMSVRDFMRRIQERLPVQVIRHSELVKEQVRRVAVCTGAGASLLGEARRAQADVYVTSDLKYNDFMTPDGAFVVADIGHFESEYCAIDILFDILSKNLFTFAVRKSVNSRNPIGYIVPSKQMKRQLYFQRTISDGRLFAACAPIHNAAPPRNPHLEGTCGATRPKRYTEVSGSFAYPVGPIAVAVRNVTAPSESEAKAKCTRLPYFKTSVMAKKLFYSMGEVSEMFDVNASLIRFWETKFDILRPQKNKKGNRLFSPADVENLKLIYHLVKERGMTLDGAARCLKQNKGTISRDAELLERLQRVRALLEEVRAELKESAEDRAVVAENGAGEAAEVSALPVRTRKKPAAQELADDAGGDGAESKGPVQVIEPGPRSEKPAPKRSAARQPRRKKEKEEAESKELFAFYEQSLFMLPESFTRRVMAELGPEEGRALCEALEGPAPTSVRLHPQRPCRWSGAEAVPWSPAGRYLTERPSFTLDPAFHAGAYYVQEASSQFLAHVLAGEEVAGKRILDLCAAPGGKTTLYASLAGSDGLVVANEVNRQRAAVLADNVRKWGLGNVAVTVNEPAQIAVLEGWFDIVAVDAPCSGEGMFRKIPEARDEWSENNVKICAVRQAEILREAWKTLRPGGLLIYSTCTFNRLENEGSLEGLLAEAGEEIVESTAFDCPPAWGVVCGRVGPFRTFRFYPHRTRGEGFFAAVARKVSDGGSRVRVPKSRRTIFAPAGRRECAELSRWVAEPERMRFAAVADVYYAYYESQYEAVKMLAESLRVIASGVAMGQIFKERLKPDHALAMFCGLDRGAVPVAELSEEEALRFLRKQEAEAAAFAEGMNLVTHGGAALGFAKRIQNRVNNMYPNSLRIFNLMYIAIAGNIGSGKTTLTEMLTERYGAKAYYEQSDNPYIGDFYNDMNRWSFNLQMYFLGSRIQQTMDILRSGPVDIFQDRTVYEDAYIFADNLHRMGLMSGRDFDTYMSIFGLITNLVPRPDLLIYLKASVPTLISQIRRRGRAYEMNIDEQYLRRLNYRYDDWIEHIYRGEVLVIDKDREDFVADAAVMEKICARLDRKREELETAKKMSIRNSLLRTYFARRMKAIDRFRRHPDQVQAEMFRQLIARGADTEFGRRHGVAKHLTPEAFAARVGVQDYESFKPYIERMLAGEKNVAAPGRVTLFARSSGTTSDRSKFIPVTRESVWWNHTLGMRDVAAVYASAKPQTKIFDGKTLTLGGSYVRENGALIGDLSAVLISQTPFWSGWFRAPKMETALIPDFDRKIEGICRECTREKITAFAGVPSWNLVLMRRVLEYTGKSNLLEVWPDLEFFAHGGVAFTPYRKSFAKLIPSEGMTYLETYNASEGFFALADDLTRDDMLLMLDYGTYYEFRSGEQIVPLEGVRVGEVYAMIVTSINGLWRYEIGDTVEFTSTNPYRIRFAGRTRQFINVFGEELIVDNAERALAAACEQTGAVVEEYSVAPCFMGLNTRGAHEWVLEFSERPDTPEHFAEVLDRELRSVNSDYDAKRQTALDPPRIHAVPPGTTLRWLQKTGKNKLPRMRNDRTVVEQLLKIEQMKIVIAGAGEMGSHLAKMLSGNGHDITVIDSDPKLLADVASLADVLTVEGDSTTFAVLRKASVRKCDLFIAVNHVENDNVVAAVLAKQLGAKKSIARIDNNEYLEPNNKEIFINMGIDYLFYPEKVAAQEVINLLGHTSTTEYVDFSSGRLSLVVFRLDPTSSLIGRELSGFKDDAAQLSYRTVAIARGGQTIIARQDEIFMEGDMVYVIARQDAVKEVMEFSGHSNVEINNMMILGGSRIGIRIATELQDEVNIKLIDYNAEKAYRLAELLDKTLIINEDGRHIEAMLEEGLANMDAFIAVTGRSETNILAAMLAKRMGVKKVIAEIENLDYINLAESIGIDTIINKKLVTASNIFRFTMSTDVQAIKCLTGSEAEVLEFIVKPNAPATKAPIKELKLPQDTIIGGVVRGDKVFIAVGNMELSAYDRVVVFAMPASISKIGYFFNMPTWLIIILLAILAVGLFVLAMSLTLIFKGHHIDSEISTNENMRKLGIKCAVQETREQMTGLEDCASEPGCSGNCAACTPEAAAAVHGSAKKMLDNELKSYLLPNLFNAAVRAGAAIMQVYKNKEDYDISIKSDKTPITVADRRAHETIKTYLGPTRIPILSEEGREMRYEERCNWELFWLVDPLDGTVEFIKGNNEFTVNIALMENNRSVASVVYVPYLGKMYLAWRGGGAFLKEGVAADSDAEYSYGQIVESMRRLPVESARHEHPRVAVSRSHKSPELAEYIEELRKSHPDLEVVEQGSSYKFCLLAEGAVDYYFRTTSTYEWDTAAGELILSEVGGETLSLPDYRPLRYNKTDLVNSWFFCRARKMPGCRSEAEMMVGECSAADMWFIELGAICVTVAVVVRVWWLVVQVLRARNKRRLLSRMFGVVSDSPDFIGISAICHDIDSVSQVADLLDVEYASYELLVVMDARLKPELFHEMLRHYRMMRVDYHPFEACSQLGVRGFYRSQTRGVNRLTLLDQMEAFSAVSSDAAVRAASYDYILPIGRNLRLKRGAIDRLAMELAVHPIHSISFVRTAVGPSLRLYAREYVGRLGRFDRADGYELSRKERITLYEPLFYELRPSRYVWILTLTGMALLAGCAIAAWSFGWLPMTLLLLDILLLWGLFLWLGAVSAPFPAGKRNAALGAVMTFWWCIGVVLVSGAVLAGSWCVQRFAGRFCLRWDAERREKYLNSVLWMLFSGTEECAHCPEAMSSRDRRLIAEDIADLVDSTYGLDPAPLRRIVERQRLDVFLLRRIRRNGGYRRAYYLHLLSRMPVDEKTVRAVERYTHSRNRYVRFCALSVQMMADMSALSSKIDAYSHRLSYFELSEVLRMLRQNVQPVDYEPLILSPNRNLRMLGLSVVWRFGIEDAEEILLRIVAENRSEESVGAMYVLCTLHSVITRPEVEKFVGGMNPVQRRVLLRYIARQGYSANALQVFIPEEEKRYYVSLVDSYKLNVGMYRILIVSEDFVLRKAVAFSLNDLDACVECADTVGAMLVLHRESPFDLVIVMGTAAEMCRQEVMDTLRADKTRRTRVFVISWPQSEQMVRSMYRMGVNQYMTLPVSLHRLRRKVINELIDREKWKMYVIVEIAGQQFKAEKGRKLYVHRLPGEENSSVSFDKVLLADNDGQVKVGAPVVEGASVKCKILKHLKDDKVLVFKKKRRTGYQKQNGHRQFLSQILVEEIVAMAHKKGVGSSKNGRESESKRLGIKLFGGQFAKAGNIIVRQRGTVHNPGENVGIGKDHTLFALVDGTVSFCKKREGKSYVSVTPLSEMAAGGQKKLDDMKNLFLMTMSLLFSMAAHAQQDVTRFLGIPVDGSKSEMIHRLKEKGFQYNQSTGALRGEFNGLEVDIYVVTTKNKVSRIMVADVNTVDETNIRIRFNNLCEQFADNPKYTSLADNCMIPEDEDISYEMLVHDKRYEAIFHQLAFDEKGWTAKSDPELLSKYTEEQLEHPTAEIETEIAAVRLRRKLEDFYSCSKRPVWFMISDFYGKYYIIMYYDNEYNRANGEDLMRNEGLSQIFITFTFELGAIPLQDILDIKKRYACLVSMEWLKEQFETRIRSVIIPSGQKRKAGGEGRAEFPIRSLHKIFVAEMKTTLLLPNGFKKIGWAIFVPAFLLGCSICFFGENFDRWLFRETVMNNIAIIGTVVGALFIGFSREKIEDEMIQHIRLNALMAAMWINYLLLIVVSLSIYNINYLTVMACGMATPLVIFLLVYHFNLYKLNRNLHHEEMKNNIRVQRAVVRLTQQQLAEQVGVSRQTINAIESSKFIPSTLLALKIARTFRQPVEAIFQLEEEDMAEKKFITCDGNYAAAHIAYMFSEVAAIYPITPSSTMAELVDEWAAQGRKNIFGETVRVVEMQSEAGAAGAVHGSLQSGALTTTFTASQGLLLMIPNMYKIAGELLPGVFHVSARALAAQSLSIFGDHQDVMAARQTGFAMLATSSVQEVMDLAGIAHIVSLKARVPFLHFFDGFRTSHEIQKIELIDEAALTAMLDRDALKAFRAGALNPAHPVTRGTAQNPDIYFQTREASNKFYDAIPDMVAEAMEKISEITGRTYKPFTYYGAPDAEHVVIALGSVTETLKETVDYLNAKGEKTGVVTVHLFRPFSVKYLTAVLPQTVKRICVLDRTKEPGANGDPLYMDVVEAFATCKEIPCERKPLIIGGRYGLSSKDTTPAQMLAVFANLKANEPKNQFTVGIVDDVTFRSLPVGEEISLAKPGTFEALFFGLGADGTVGANKNSIKIIGGTTDKYCQAYFAYDSKKSGGYTASHLRFGDKPITSPYLVTTPDFVACHVPSYVDKYDVLKGLKPGGSFLLNSVHDAETTCRTLPDHMKVFLAKNKINFYIINATKIAAELGLGSRTNTIMQAAFFKIANVIPFEKAVEEMKKAIYKSYGKKGEDIVNMNYAAVDAGGNAVVKVEVPAEWTNIELKPADHGVDMARPEFVRNIVDPINALKGDLLPVSAFNGREDGTWENGTAAWEKRGIAVNVPEWQVDKCIQCNQCAYVCPHAVIRPFLATETEAAASGTEWKQGLGDTKEYKFRIQISPLDCTGCSNCVDVCPAKEKALIMKPLESQLGQQKNWDYITKHIGYKKVVDKTKSVKNLQFEQPLFEFSGACGGCGETPYIKAISQLFGDRMMVANATGCTSIYSGSAPSTPYCKNADGRGPAWANSLFEDNAEFGLGMYVGAEKLRDRIQMLMEEAIAQCQRCSEELKGVMREWIEARVSSTRSAEVAARLVPMMEACGCDYCRQILELKDFLVKQSQWVIGGDGWAYDIGFGGLDHVLASGLDVNVLVLDTEVYSNTGGQSSKATPVGAVAKFASAGKRIRKKDLGAIAMTYGYVYVAQVSIGASQAQLFNVLKEAEAYPGPSLVIAYAPCINHGIKGGMTRTQTVGKQAVECGYWHLWHYNPQLEEQGKNPFVLDSKEPDWAKFRDFLLKEVRYTSLKAVSPEDAEALFQAAEQNARWRYEGYVRRSKIEYMINYQKHTLPNGLTVVVNRDRSSKLAAVNLLYKIGARNENPSRTGFAHLFEHLMFRGTKAVPDFDTPVQMACGENNAFTNNDYTDFYITLPKDNIETALWLESDRMTGLDISQENLETEKRVVIEEYKQRYLNQPYGDMSMLLRALAYRVHPYRWATIGLSPDHIAGASLDEVRDFYRRFYHPSNAILSISADIPEERTIALCEKWFDPIADNPQPAASLPQEPPQTESRREEVERNVPATMIVLAYHIGSRTSPDFFLGDMTSDLLAGGESGRLYQHLVREQRLLGSVNAYVSGEVDPGLFVFTAQLLPSTTVEQAEAALLREIEILQTEKIDEYELEKIKNKFEANTLFGELNVMNKAMNLGFYEMLGDLPLINREVTIYRSQTAEQIADFSRRTFRPENRSTLIYRAKQMKQPPLITPREVDVPRAQRHTLPNGASLYAIPSDDFEVLRFTFVFRAGSSMQHAPFAASATANMLSEGSRDMTARQIAERLDFHGSYFEVNVDRDYVYISFSSLSKFFGPTLEVAEQILLQPLFPEDELRAYCEKRKQTLTIERRKVDTVVREIFAEALFGDKHPYGISYPEKDYDTLTRADLESLYRRLYTAENCLVVCSGRIGEEELQGIGALAEKLPRADRSATADFPAPRSEAYRFVERPDAVQSSLRVGRLLFTRTHPDFVGMQVVATVLGGYFGSRLMQNLRGEHGYTYGVGAAMVNFEREGYLGIAAQVGAKVTAPALREVYNEIERLRREPMPEEELSLVKNIMTGEVMRILDGPFGIADVTIENLLCGTDNGVIEENIRRIQAITPAEVQRLAVKYLRREDLITAVVGAVDPFTKLMEDIKLKSIPIRDLIAGYSNDPDNGVRAYGGKLDVRPPYQREFRYDEKQKQAVIETILKKFPLNIMYWSVCEDGKYEMIDGQQRTLSICEFYTHDFNIVDKDRGVLFFNTLTDEEKQSFLDYELTVYFYSGTDKEKLDWFRVINIAGEKLLDQELRNAVYAGPFVTDARRHFSKNGCPAYKIGSDYMSGNTVEQAYLETVLKWAARHDGIHDEKPIDKYMAIHQFEPNANKLWAYYMQIITWVRSTFPHYRKEMKGLDWGAMFDEFGENLYDINALEKQIHDLMEDDEIMKKSGIYRYVLSGDLRDLSFRSFDKKQKREAYERQKGICVHCGKYFELEEMEADHITPWKDGGTTVAENCQMLCRNCNRIKGGKMANNNLNKAKEAKKDEFYTQLEDINNELKHYREYFRDKTVLCNCDDPRVSNFFTYFAYNFEFLGLKKLITTCYKNQDIDLFSTNKSEQAVYLIYEGDKNGDHIPTADEIGVHPLKGDGDFRSAECIELLKEADIVVTNPPFSLFREYVAQLIEYDKKFLIIGNVNAITYKEIFPLIMQNKIWMGASIHSGDRKFWVPDNYELNATGCGVDETGRKYIRVKGVRWFTNLDYKERYEDIVLYKSYSPEEYPQYDNYNAIEVSKTELIPNDYDGVMGVPITFLDKYNPNQFEILGITDRGNIYGLTTKTYTAGDASNFGDLNRRAAYYKIDGRGGYKSLISSDLCSCVDSKEEISLIKLGHKKYDRPYINGERKYARMLIRKKKMSEVRAKKALGQHFLVDLNIARKICDSLGGGTSEKPCPVLEVGCGMGVLTRFLLKRTDVVTYGAEIDSESVAYLHAHYPEFTPRLMEGDFLKMDLRTLFPEGLRVIGNFPYNISSQIFFKVLENRDLIPECVGMIQKEVAVRLAEPPGSKEYGILSVLLQAWYDIEYLFTVNETVFNPPPKVKSAVVRLRRNGVDRLDCDERLFVRVVKASFGQRRKMLRNSLRAAFGDFGGAEHPFFTQRAERLSVADFVELTQWVEGLSDMKKKNAQFNKKTATVALIFMLATIMWLTINVVWCLHDGHYANLIIPVLFVVAGVAMFYNEFHKKSRKHVEDVKKYLMIVVTAVCLFVHPTSGGALLVLALGGSLAALILDYRRRERERKKSKMKQNEDSLLREKLKEYFGFSSFKGNQEAVIRNVLSGKDTFVLMPTGGGKSLCYQLPALLMDGVAIVISPLIALMKNQVDAMRTYSNDAGIAHFLNSSLNKSAIAQVRNDVLEGRTKLLYFAPESLTKEDNVAFLRKVKVSFYAIDEAHCISEWGHDFRPEYRRIRPIINEIGTAPLIALTATATPKVQMDIQKNLGMSDASVFKSSFNRPNLYYEIRPKHDVDREIIRYIKQHEGKSGIIYCLSRKKVEELTELLVANGIRALAYHAGMDAQTRAANQDDFLMERADVIVATIAFGMGIDKPDVRYVIHYDIPKSLEGYYQETGRAGRDGGEGHCLTFYSYKDIQKLEKFMQGKPVAEQEIGKLLLLETVSYAESSMCRRKTLLHYFGEEYPEENCGCCDNCLHPKPKIDAQASLRMALEALRDLGDKFKADYLASVLVGKNTALIKSYGHNKSEWFGAGADHDIRYWGAVIRQALIMGLIDKNIENYGLLSINAKGEEFIAAPRPVYITLDHDYDEEEKETDAVAPTGKGGAADEELFSMLKDLRKKVARQHDLPPFVIFQDPSLEDMAIQYPITIEEMQNISGVGVGKARKFGEEFIRLIRAYVEEKEIVRPQDMIVKSVGNKSGNKIFIIQAIDRKMDFEDIARTKDLDFDELLTEIEGIVNSGTKLDISYYIEQVIDEDKSNDIYLYFKEDAQSDSLDEAIEELGGDYTEEEIRLVRIKFMCEQGNMRLYTSELVKKYKARTVVNHVSIDVNQGEIVGLLGPNGAGKTTTFYMIVGLIKPNEGQIFLEDDNGQVAELTKEPVYRRAQMGVGYLAQEASVFRRLSVEDNIKAVLEMTDLKKDEQAARCEALIEEFRLQKVRKSLGIQLSGGERRRTEIARAVAINPAFILLDEPFAGVDPIAVEDIQSIVATLKNKNIGVIITDHNVDETLAITDRTYLLFEGKILKAGSAEELAADPMVRKVYLGQHFELRRSPTLDKLRKGQPASAAEENPSEEKMDQSVPPGRVRGICIPPCSKSYAQRALAASLLAEGTSRLHNIEFCDDTRSAIRCIEALGARVRRTGERTLEIDGGLSPAGDKLYVGQSGLSTRLFTPIASLCDTPIGVVGEGPLLHRSFRTMIRTLRALGVRVHDRNDHLPLHIQGPIRGGEVQVEGLVSSQFITGLLLALPIAEEETTIHVPHVISTPYIDITIDTAERFGIEILHKDYKEFYVAGGQRYRPAEFEIESDWSAAAFLLVAGAVAGEVTIRNLSVLSRQADTAVMTALIRAGASVIDEGDTITVAHRPLQAFSFDATQCPGLFPALAALAASAEGTSVIKGTSRLENKEGNRAESIREEYAKLGIEVDLDEEDTMKIRGGRIRGGHVHSHDDHRIAMSLAVAALNADTPVVIENPACVAKSFPDFFERLESLRTVEMPTRREIIARIETPLTALYGEREARQIARIVVMELGGLCLTDLVAEPDKELGIDELDRIIGELAAGRPLQYVLGHTEFYGLDFQVREGVLIPRPETEELVRWIAESPAPDNPAVLDVGTGSGCIAVTLARLIPESRITAVDISEKALSIARENARRLDAEVDFRQGDALGELFPGQREQFDLIVSNPPYIPRSEKASIRVNVTGYEPAEALFVEDGDPLIFYRAIARNARRLLRPGGRLYFEIHENFADETFRMLTREGFPDTAVRRDLNDKNRMTCSLQRRMQPAKKIKRDKTPEQAYAALIRLCARSEKSSGDALRLMQRWGVEPSARQGVLQKLLADRFIDDNRYAEAFVRDKIRLSGWGARKIRTSLRLKGIAAAIIDEALARLDPANQSERLRTQLEKKLRLTRYKDTYDLKTKLIRYGLSLGYDYDAVLDAAGELIQTNDEPCDDFMRRLLISALLLCSAPVSAQHLAPEDYIFPLRDVAGLYSANFGEMRPNHFHSGIDIKTDGVTGKPVLATADGYISRIAVTPGGYGRAIYITHPNGTTSVYGHLSKFRDDIEKYVHEERYRTRRNSINLYPSADRFPLKQGEQFAWSGNTGSSAGPHLHFEIRDSRTQRTLNTISSGVIRTRDDIPPRLVKLYYVEVDSVRGVPVHARPRPVELVEKTPGRYALKQEGALSVGGRGYFILEATDRKNDVSNTFGLWRIREFADEDPIFELRIDGFAFDQTRYCNAVTHYPMQVASRNEVIRLTRLDGCIDDFYPVLKNQALLTPSEGQSQQIRIEAEDDSGNRSILEFRTIRQPAQRDFRAVCDSTALIVDNRRPFSHTAGEASVHIPAGVFYEPLFFSQSSRPAQFAAAPSVAVLSPLYSILDYDTPLHTAATVTIRAYVPQNLQPHTTLGFVRKGKVSYAGGKYKNGAVTLSTRTLGDFCVVADTVPPRIEPRFKAGEPIRTRSITFRLRDNFSGIGSYTATLDGEWILLERNPMQGTITHTFDDSRTPKGRSYTLQLTVTDNCGNKTVWKRTITRMCEILMCGNVVLSVYGSEIKGKSAGILGANYFFRCVVLTIMRANEYQTRAMSTRLPSCENATYMLFGLMNIGLVDVDGHHFPNLALMKLSAWHKSHGDSVEFANPMFGRYDRVYMSKVFTFTADCADYYPCEIVRAGTGYKDYTITLPDEIEHICPDYSLYSVNEAFGFLTRGCPNGCPWCIVPHKEGSIRPASPLREFLGDKRRAILLDNNVLASDFGLEQIEEIIRTGISVDFNQGLDARRACADKYILDLLSRVKWIRYVRFACDRISQLDSVTKVVQELSKRGIKPYRIFVYALIGDVHESLVRIEALKRLGVSPFAQPYRDFENNIEPTKEQKRLARWCNHKSIFNSIDFKNYKGMKEYTQADFDAFEVIDGIKQYPSGDYSDIQIFGERCSFGERCSFGKECSFGKWCSFGEDCSFGEECSFGKWCSFGKECSFGEDCSFGEECSFGEECSFGEWCSFGKWCSFGEDCFFGEECSFEGKGEYIGDYPFLAFVGFGSRIGSKVYFFNLQDGIYVRCGCWLSDIARFRERVKAKNTDAMYLDLCDLVERKFNRKNMTNLSYRQAMLIKHTAWMNTRLLARGPRPEDERYVPLAVRMLTLVGCLNYAMLDLESELTASGLFHHETKRRYTQAQTLVSQAHGVAWSMLRKIDDRAARQYNDKTDEAYRTISGCILLEAPQRSYNIVLSLCRIISSLNGRISGRYDFNPAKPLVRIPALLECIGIEDCKIDGIIELNLIDMKHLESNIQRAFVRWFRLQYPEYALNLTSVPNGGLRSKTEAAIMKAEGMTAGAADLLLLVPRDGFGVLGLEFKTQVKGSRQTPAQKQWQKSFEQVGNKYVLVRTLNEAITAVQNYLDKMNYDEILKQLKIEGNPTPCARFTFSIPNAKEELVTAMSAVLGAMGERFVWLPEYDKVAEWLSANNGKGLLLFGNCGRGKSLLVRYAIPMLLRKFANRIVTVVDCGSQSVNIDDVIKRKFITLDDMGVEVDRVEFGTRRNLVVELINKAQDKPDTLLFISSNLTGEAIKDRYGDRIYDRIKYLCHRVAFNGNSLRKMANIRVGLSYYSVDTDRYLDIRIRRLVKAFGCDGIAVYDYLLCNIYRVKGCFAAWDESTAFNVAEYLRLKESVVLEIVRYCGVVGLFNKELLSRGIITSAAIQRRYIDTCIRAKRKNLEIPEFCRILPEETAKLPEESPNTPEFCREVKKSIISSPYVEDINNPPLYPPEGEEDYIPTEFVTLWDKFKGKRKSLTDDYKDFCKKTEGLVIDYVKLQRSAQFAKNVYFQTWLNDFFPKKSRRNIDLSAVEPAFQPIMADWLAYKSERGQTYRPLGLQRCYVRLLTLSGNDAAKARRIVDFSIANNYSGLFPPHDQDNSANRHPATDYHAQPGQTYEDFMALECMNNPNIEAMIERLDQLGVYYARSGELLSEVVGMRDAAVARLFHDEKETIISLSPSLATKLVNSSASELNALEKWLDRINASCKHQCDNLRTMISYEKERLKLMIGYEIKSWEIRQIVRILRDLEFCDASTIRGLNAIRMGRILYKKIIKRHAKNRTNTEGSSEYSDGSMSQLINVSICVSDIPRDQIKVANNGKKYIAVCVSQFREPDSYENTHSVFMRQTKEEREAKAPRVYIGRGKAINFTSAPVTVENIADMPLAARVDDLPFMEAAIKAFKDNEEIRDITLRELSQYGKSHQFGDCRLEEAEVGVKYDYADCGDSKLYDMYATLESLKADIKERETMLRQLPVSGLADPETGEMLYPPVRSSKTSIKTTFKKQPMELRKISEEQKRLLDRPLPSEAISPHPTKNYLSTIKAIYVTERLNDVFGVGSWRVRSEQVARDNKMVVVKVTFEIPEYGIYYECYGGNDNSDLGDAHKGATTDALTKIGSWLGIGADVFKGKSRNMSAKCAAAAPDPLASARPDTPRTKHRITTDMLDDPIKCDCLLNWGYDLWTASGYAADFDIAARLLKSYDADTDVLKRYAALFNSYKMARHGKMKTRIEIYEINRPQNIVASGSWNRQLSAAEIRKETKYMMRYSDSKKFASRVITDRDMNTSYYVTDTAQMPPSTRKEPSEEYYFFESTRFNRPQTTIHLTDQEIRTFAKRIADYITRRTVAGPMESFDFQIEYHGVAVQGRYTVETERQGAVHSMGMTEWIDVPIREETSIASAWCTATDEEVPRVMEKLNELLKMAHLITLVVVSVPVCLVFGWALSGPRRMRITRYLLNEIFEQRMQTFFSESTVKSLWGTLAGRLWRAWYRLKSKVRRTIDKSRRRAHKLQNRPRVYRVEIRIGSSGDLAQIGSSGDLAQIGSSGDLAKIGSSGYGAKIGSSGYGAKIGSSGDGAQIGSSGDLAKIGSSGDDAKIGSSGDLAKIESEGNNAVVAAIGIDSKIKAKKGSWITLAEYGEDLKPVCVRSAQIDGKSLKEDVFYQLKGGEFVEAAEMIGIYILLFVIIALIVYLIYLVRFWGRTNIELTGDTYTMPVGKNKLEAAEYVNNAEDFVVKTNHNFLNLLVSCITCGIYTPTQTKFYIPLRDVQNTAQDGKIKSDKMEILVKQNRKTVKQKMSDILLDVSWAKISERYFGKSRSWLYHKMDGVNNGKPDDFNEAEKETLRSALLDLSERISKCAKSIMEVELTEKEWDLIESIRNYHKAYPNGKEEQEWYIEMILQELLDRDMFGITNIIHFCVLYKYFYIIFSFRLKNVYLYRQIYMQYKYVCSIRYFVSITYSMKKHIERMSRIEAAINPMYCVPKRSDLSLIGSAFEAAGFRCVRIRTECEAEHRTKGGDPRRHGMLILDGDRVILEISRSKKAECKTAGSAVMYLRIQPTEKNTYEIRRHLNNDNTPHLLDSPKFSKAMKMISFTITNKHRPTATIVMLVSFYGKQYRKSIGIGLPTLYWNEKKKCARTTADFHGEPINDAIDRWREIGKQAVKHFTTLRQVPSSAEFAIKLNELSNLPDDDIPNIAVFFCDYLEHTYIPRYHLVRRAHTVKKYHTALHKLKEYETHTHHRLKFSDIGIDFYNNFQHWFFTCGFSANYFGNIIKIIKQVFRESRTHDKIHTFDGTDHRDFIAPKEAADTVYLNEEELQIIRRLDICSSIANDTTHPLSEENALRKVRALERARNLFLIGCYTGLRVSDFSRLREAHVGRHISIKTTKTGANIVIPIHPVVREIIEKGFDLSTSISDQKLNDHIKELCRLAGFTEEIMVNKNIGGKNMELIVPKYKLISSHTARRSFATNAYKAGVPTIAIMKITGHTKESTFLKYIRVSAEENAELLSQHPFFMLHMVFFFFLIGSLSLLWFITGLKMNKTDPNNEIEKIYPSYWHLITAIILIGCAIFQLYMVYGDMAFLCIFFGSISLLFFILRLRQKKAEFKDETEKFYPNFLHLFVAIFLCLCYILYDCMGSESMLQEILWDTKIGWWKVDMARRVLLLSDYLCKTIGTEESEIGYDRFLQSVGEPFRASLKSLMSTDASLFSAEQIFSLCGPRGEVWFRWKVLRRETAADKGLVVSGYAQEISEREALPVDLCSIERMNTLLYRLNNISHTLLSFLHIGSIDEAINKVLTDVLKIFRGSRTYIAEFDWDNRRHIYTYEVTDKGVESGRDRFDRLSMDETPWWVEQLEKRSPIALSCLDDLPSRARNEHDILAAQNIGSLFVLPMTFRDKLWGYAGIDVIGEHRDWQNEDYQWFASLVNIINICIELQRSKREAQIERDYLQNLYRYMPLGYVRFRMIYDKTGTPVDYKVLDSNYAAEKIIGKSQADYVGRLASELEIEDMPEYLKVFAKVLQVEQHVEKEVRLLASGRYVHVVMYSTTPEEVICLLSDMTEMYETHEALDRSEKLLRNIYDNIPVGIELYDRNGLLVDLNNKDLEIFGIRDKEDVLGVDFFKNPILDEEVWRRVRNREEFSFKAYYPFDRLNGYYVTSKQGRLEIYSSVCMLYDAQGRLSNFFLINIDNTEINRAHSRIAEFESSFSLVSRFGKVGYCRFDLVSKEGYGVPQWYYNLGEKEDTPLDQILGVYKHVNSSDRAEVLESIRQVKAGEIDSFSHDLRIDADGRQKWTRINVMRNPLNNDPSKIEMVCVNYDITELKETEKNLIEAKNKAEVSDRLKSAFLANMSHEIRTPLNAIVGFSNLIAETEDPDERREYVAIVQENNELLLKLISDILDLSKIEAGTLEFNDVEFDVNQMCQEIVRSLSLKVLDKPVELRFGDHLPECRLVGDKTRITQVLINFINNALKFTREGSVTLGYRCDDGMMLTFYVEDTGTGIPEQEQESVFERFVKLNSFVQGTGLGLAISKSIVEQMGGRIGLNSEPGKGSCFWFTHPYIRTRSVSAVASDAEMRQPGVSEGKMPVVLVAEDTDSNFLLVSLILKKGYEVLRAHNGAEAVRMCREFAPDVVLMDMKMPVMDGLEATRQIREAGSSVPIIAVTAYAYDSDRAKALDVGCDDYIAKPLTGDVLKKKLRKHLKRMGEQNVIRLRGVTIYHTDDPFGSRSEKKLLQQGELILSDLNFDINAGEFVYLIGRVGSGKSSLLKTLYAELQLIEGEGYVAGFDLRKLKRREIPMLRRRIGIVFQDYQLLTDRNVFMNLYYVMKATGWKNESEIRKRIDEVLKVVSLEAKGYKMPFELSGGEQQRLVIARALLNRPRLLLADEPTGNLDPLTAEGIIRLFQEIARQGCAVVMSTHNTALIEEYPSRTILFSKGKIKEVPVQTMLQDIMRLRTLFRLFLLLAAVAPITTAKADSLIIGTDTLRLDLHWLDDTPLDELARNDRVFEKKFQALIHQPTAEGFVIYIDGDHEHHSYWRLIDDKLYLDHTIRKSDYSEIDFSGIFVRDHTGYYPATFYSGTLPISGIFYQDGTKPIFVFEEGRLTYTNWTYPSFPCPSPMLGDPLFLHFDYMQFAQFTDGLWTCWMRILPDPSGNPITIQPLIVAHKSGIIDASDAAKKRLKTAIADSLKTVDFICDVNFSRGSIQAVLKTFEIPRPILYRKEIRKNGRRLVGYENATGRPIVPFGKYARCHTPIISENRIGIVETDEGKFIAIDHTGKKLFEIMFQSPVLSVEDLFRYGYFIYVTRNGRQGVATISGLRYTQPTHKPIDLSDVDRDVIKALIHMYDIFKVNMSTEGKEIKKQEEEYSASNIQVLEGLEAVRKRPAMYIGDIGEKGLHHLVYEVVDNSIDEALAGHCTDIDVTINEDNSITVKDNGRGIPTDFHEKEGKSALEVVLTVLHAGGKFDKGSYKVSGGLHGVGVSCVNALSTLLIAEIHRDGKIFRQSYSKGAPTSPVEVIGTCDDRGTTITFKPDGSIFTLTTEYKYDILANRLRELAFLNKGIHLNLLDKRQRDENGEYVGDHFYSEEGLKEFVEYLDATRGQAITESIIYIDTEKNGVPVEVAMQYNDSFSENVHSYVNNINTIEGGTHLTGFRRALTRTLKKYAEDSGMLAKLKFDINGDDFREGLTAVVSVKVAEPQFEGQTKTKLGNDEVSAAVDQAMSTALSHYLEENPRDAKAIVQKVILAATARHAARHAREMVQRKTVLSGAGLPGKLADCSSRDRSIAEIFFVEGDSAGGTAKQGRDRNFQAIMPLRGKILNIEKAQEHRMWENEEIKNMFTALGVTIGTEEDSKALNLEKLRYDKIIIMTDADVDGSHIATLMLTFFFRKMKELIENGHVYIATPPLFLVKKGQQERYCWTEKERDEITAEMGKGVHVQRYKGLGEMNSHQLWETTMNPDTRILRKVTIDNAAEADRVFSMLMGDEVPPRREFIEKHAHYANIDAMIFSRICTRTKSVGISDFICPMKRPGICFFFFPAVGFRINYVKKTVCFVFSFPVCRMAELRVCCQLRPFRMNVTVIGVAGGTGSGKSTLVKRLQEAFKEEEVVTLCHDYYYKAHPELTYEERTKLNYDHPQSFDTDMLVEHIRTLKNNVPIEHPVYSFVDHNRTAETVLVKPSKVIIVDGILIFENKELRDLMDIKVYVDTDADIRLARRILRDVCERGRTMQSVISQYTTTVKPMHEEFVEPSKKYADVIIPEGGFNSVAVSMLIRSIQSQINAKMIKRYFIVVLLLSLFPAGVSAQRRAAAKKDWKTKYDYVGAVHDGRILVHRGGEGSNPRMGRFYTDGCFGYTDTCGTVVFPLIYDYADSFSNGFAVVGKGEKNDRRFGLIDRQGREVVPCIYADVAGFSSGLARVQEGTDSVRRYGYVDTLGQVVIPLKYDYARDFSEGMAVVAKGEWSGKSGYGKRDFEFTGKYGFIDRRGNEVIAPIYDGAADFSEVLAAVGQMGKYYVRWGFVDAAGTLVIPCKYYEVSSFRNGRAVVCIVSGGALKYGSIDRNGREILPCIYDWVQPTPFGTTWVGEGEDFASRACTLLDVSGKPLIDYKVYQVNPSGKFGHASAGVPDSTGLLRFGVLDGRGRVIVPFEYDDITIFSEWDSAATAYVERGIAEVKGKKYPFALRRGEMAIEKKYVETPLMKQYYAVKAVHPDAILLFRVGDFYETFGDDAIKASGILGITLTRRANGAATFVELAGFPYHAIDTYLPKLVRAGERVAICEQLEDPKQVKGLVKRGVIELVTPGVVLGDNILANKENTYLAAVYFGRKNTGVAFLDISTGEFYAAEGSDAYIDKLISNLAPKEIIYQRGYEDRFSDAFGSRHYTYRLDEWVFSESVNRDKLCKQFGTQSLKGFGIEQFSSGISAAGAILYYLEFTEHKNTAHISSISRIDQEDYVWVDKFTIRNLELFSSNGSREKCAFADVVDRTLTPMGGRLLKRWIALPIKEIDRINERLDVVQRFYDEPDLAESVAEQISQVGDLERIASRIAAARVTPREIVQLKNSLSAIELLKALLESTDDERLHALAGQIDLLAEVRERIAREVYPDPQNNQIQRGGIIADGVDAELDDLRRIALHGKDFLNRIQQRESEATGIPLKISYNNVFGYYIEVRNTHKDKVPESWIRKQTLANAERYITEELKEYEEKILGAEEKMLLIEQRIYAELIGFITHSLGALQRDAAVVARIDCLQSFARIARERNYVRPTLDDGTRIEIRQGRHPVIETLMPVGEEYIPNDLLLDDKEQQIVMITGPNMSGKSALLRQTALIILMAQMGSFVPAKAAHIGVVDKIFTRVGASDNISQGESTFMVEMLESASILNNVSDRSIVLLDEIGRGTSTYDGISIAWAMVEYLHNHPTARAKTLFATHYHELNEMEQMCPRVKNYHVSVKEVDKTIVFLRKLERGGTEHSFGIHVARMAGMPASVVARAEEILKNLELVYGNNEIVPSKSPRRRDRKALPGVREAAEAGDQTRGMQLSMFQLDDPVLVQIRDQIKGLDINALTPIEALNKLNEIKKITGLMTVMRKLTLLLLCLALGIGVCDAKKKNRGVYFRTDAEIVLDKPYFGLNVSNMIQVVLEADRNPASVRVETENVPAEAVSVRVRRGELVLACDPGALSSKRKNDMSKRVVVYVGAAPLESFSLSGMSSVFSETGIDKPSVTVECMGMSEFESDIRCRSLTMSVSGMSIYKGQVVCEDTATVEASGMSQAVADFMCRDLDCTLTGMSVYNGNVNCRQKAEVAVDGSSECTFSGTARNLMLEVSGMSQFKGRKFLASGLADCDISGMSTASVAAAGSLKYCVSGMSEFNYSGEPVVISTSVDNATVRHRMTSELHPLEPFLPVGARLLMLGSFPPQRVRWSMDFFYPNLQNDMWRIVGLVFFGDKGYFLTPDAKRFDKERIVRFCEEKGLALYDTAEEIIRLKNNASDNFLQVVREVDLAQLLAAVPTCRAIVTTGQKATDVIVRLAGCAEPPVGESVEFAYADRTLRLYRMPSSSRAYPKPVEWKADYYRRMFAVCGMLMNGFTNDLRSEVASGALHPQHFRMRAIAKYLRGRVVGGCRLRRRCSRDSAWAGSDCRMLKTHIATQIYAKICFNTTSGQKKIIESLSEYLAESDPVAIFVLNGYAGTGKTTLIAALVGALKDCGIKPVLLAPTGRAAKVLSRYSGEPALTIHKRIYRQRTNADYESKFSLNINQERGAVFIVDEASMLANGSSDGAIFGSGALLDDLVSYVRGGRDCRLILVGDDAQLPPIGADYSPALDPKALSVYGEVIYTSLDEVVRQEAESGILFNATLVRCMLENGICEVPRFRMDFPDIEAVEGGEFMEKLQDCYDRYGRDETIVITRSNKRANRYNDGIRRYVLGAEEEIESGDLLMVVKNNYHFTERTEDCPMNFLANGDIAELRRLRRFEDFYGFRFATAVLSFADYNDAELECKILLDTIASESPSLTREESNRLFCEVEKDYLDIKSKLKRFKEIRENPHFNAVQVKFAYAVTCHKAQGGQWRAVFIDRCLFGDEPMTRDMLRWLYTALTRATDKLYLVNFDERFYEMTKRIIQIVLAVVIVCLIYVIYKQISTPIIFAKEKAAREARVIDRIKDIRTAERSFKTKYNRFTGDFDTLINFVLTDSLEFERKIVDEDDSVAMAQLKKSGRKNSEKVWVHVIDTIFTPKKLTAEQVRNLRYVPGTNNQTEFELEAGLVTTESKVVIPVVECRIPYKMFLDTVRFRQEVINLVDDQENNFSNYGGIKFGSMEKGNNEAGNWGDEMSIRLRLDGHSFSEEKLDIPAKEKKTVEIEVLTGKTMLVPREVFDAKAAPALMRINGMEPTEKECILTSDPQQPVIALMAADKASVEKVRARLKEKIRWTSPLLRTGEFTASCLWIFRYEELAYLKVWERQTLRLAETFIAPTGEDLLFYVRELTQELQIENCEIRLEGNPTKQDGRLLREYFKHVAICEMRIVSGKYRGRAINPPKNLRARPTTDFAKENLFNVLGNLVDFEECDVLDLFAGTGSISYEFASRGVHSVTSVEINPVHYNFIKKTAADLGIDNLFAVKANVFLYLKSCAKQFDLIFSDAPYDLEGSEEVIRLVLERDLLKPDGFLVFEHSKNINFSSDPHFWQSRSYGSVQFSFFKKMRIHRFIDPKQRDAAKREVNRSCKALNLSLDTINLRRFAHIESWIRQGNTLSLKRDRIVIWNKMFRMPFLNMKSIQVPKKAPRRFHDSYKIPMANIFSYPMIKFDMSLKQFQKPISMLFFVACISCITVACDSDDDGTKGDDNKFPAPEVTFSAITGVSFTAGWNALETADSYRYEVSYEKDGQVVAVAAQNTETTTFSLDGLLPATDYSVRVVAKAEGKTISDWFSGTVRTLGGESVTFTVTPYERYIENAFIYPYAEVKPSDSEVYYWVSAIPSNSERDPKEWMQEDIDYYMELGKTWDDLVADKLILKGDAESVPFAFTGYDHYYFIVAPVGKNLSEIVVSGEVSRSYRFWYEAREVQMLHESTYEQFAGEWLLQTSGTVKEENGSLDVQEVGEEFPVTISPADDKKSFYLKGWGGDRNKFRDFAIKMDFEPAEDNYHKIGISFPQDIETEGDIVWKYVSWYNFVGTVGDEKVYTYLPYDDKMYENMPSWSKGFIGFMGNLNKTVIKICPLYYMDGNNEGAYIMSMWPYGISSTGDVEQDKLLNNKYEDPVGPYYLIRKDVADGLVLQLPDTEEPDADVAGLLNALQSVRQANTPREVFSVKRMMLVAAGLMTGCGKDSEETPTKPEDPGDPIPPVTTTYEIGDYYENGFVKGIVIYIDSEGKSGTVVSLDETEAVWSYKYEEPMASFPQTGRYNTDCVYNMEGWRENYPGFLWCSEKDVMGVKNWYVPDQRELGLLYEAYSGVRGGGSLSDDKIRKNKQQFNDTLKEKGGVPLSDAVYWTSAECSARMAYAFDMASGAMIEIPQELDKGMKYKFRAMADFKFMNLFLRFLFMGAVCLLPLVGCSDDDTEGTGPEPTSDFQFETLELTQGSFKVKITPEDKNMTYFFGVLEKSDFSQFENLESLQAANIENIKALAEANGVGVEEFLLEALLKGEQEWKYNTLVPETDYVFYAYGLSTELEILTTVNTYEFKTLVVEQVEVNFKITASDVTPTSFTLNVEPDRTDCVYYYDILLPAVYMDYCGGDPANLPAFVENYLAEWKKTERYATYTLPEFIAEVTVSGKTSDSSFENLLPEGTYYAFAVCVANDGTCISEATVETIRTSESPKNSYTVFSEVVTDVAYSAIVTAEQSEAFAVMMELQEYFADAKSDAEIIQTIYDAYNQNISKYLYADVANVSFGGLIPNDKYYLLIFACNPDGSPKLDDKINLKKVEVNTSPAAMSSVQYELSVSSIAKIDAMVTVRADGNYENETFLFNYITKAEYDAISGDKTAGLKAHMDAFIDARVKDWNDSHPNSGVMTRKEFLSRALMNGKEDLFVPIEIGGLTPGTTYYLYVFGLKADGTYTTEPVTTQFTTVADQVTLASLEFIVMSYGYPEENRDMYRVWTYANNSKEHYFQSFVGEDEWAGKTASEVRELLKASKWPSSSSYKVDAQFGQTWYGYSVAYDEAGIPTKVYKLWHTSPADTGDGFNNITGGTITVDIEELSEMNTNDFALTILFGIKKFLAWIGIPSHMLDKMDELLFLIVIVIIAFIVAGIVHAVLVHLAKKILKRKRVGFFESMFKYGVFRKLTAIIPPLMVSALLPFAFSKDSAWFILSEKITWIYFFIALIISVNAILNTVGDELKKNKQLKNRPMKGFIQIFRVVFYCVVVIVIISILINKSPLNLITGLGAFTAVLMLVFKDTILGLVAGVMISEDDMLRIGDWIEMPQNNINGTVTDISLDVVKVQNFDNTIVTVPPYSLVSGSFINWRGMSDSGGRRIMREYTLKLDYIKPCTPEFLEKMKAFDKELAQFITEKQKQAADGKVANTDNPEGLVNGTIDTNLGLFRAYMVMYLRRHPFVSKELLLMVRTLPPVANGLPVQIYCFSSNKNWPSYESIQAEIMEHFVSVLPAFELYPFQNADARDMILSSYIESAKVDLSTLIGIPWHTTVTQSNPFDVEKQEAQDSSPKAMDNLFDLTGRVAVVTGASSGLGADAARAYAGQGADVALLARRVEKLKTVADEIAATGRKVLVVGCDVTDEEQVRKAIGQVVARFGKIDILLNNAGVAVPGTVEQLTTDEWDKEMNTNVRGAYLVCKYVVPHMRERRYGKIVNISSVNALIADKSPLLARHVYNASKAAVLGLTIGMAASYGVDGITVNAVCPGLFESEMTEDTLFKNEEFMRMYNFTDPMSRPGRRGELNGTILYFSSDASSYVTGQHVVVDGGASIVMIRCLSIATVLTGMAITLNAQNMKPLTPEEERVIVRKGTEAPFSGKYYLHDEDGTYRCRRCGAPLYRSQDKFDAGCGWPSFDDEIPGAVRREPDADGRRTEILCAKCGAHLGHVFTGEGFTAKNTRHCVNSLSLDFVPVAVPTVPVTDPAAASAEKPENTSSAEPPKSVQTERAIFAGGCFWGVEYMLGKVDGVKSIRSGYIGGHTENPTYEQVCSHKTGHAEAVEVEFDPSKVSYETLARLFFEIHDPTQLDGQGPDLGDQYRSEIFYTTPEQKEVAERLIRILKEKGYSVVTDVTPASHFWPAEQYHQNYYNRKGTQPYCHRYTKRFMLLVKNIAKIVGVDESGRLRVKGRDMNVLGEIDNAWLLADGDRIAAYGTMDKMPEVAPDTEVVDAEGGMLFPSFCDSHTHLVYAGSREQEFLDKINGLSYEEIAKRGGGILNSADRLHETSEDELYEQAMERIREIIAMGTGCVEIKSGYGLTTEDELKMLRVIRRIRETSPITVRATFLGAHAVGRAYKGRQQEYVDLICREMIPAVGREKLAEFVDVFCDQGFFTVEETEQILRAGAEYGLVPKIHANELAVSGGVQVGVRNKALSVDHLERMGAEEIEVLRTSGTMPTMLPGAAFFLEMPYPPARAMIEGGLSVALASDFNPGSSPSGSMKMIVSLACIKMRMTPAEAINAATLNGAYAMGLSSEYGSITVGKKANFFLTTKIPSVAYLPYAYTSPLIHRVFLRGQEVKMIHHISAEYLTVDRVREILENNIKIDLSEDAKKRIVRCREYLDNKMETQKEPIYGITTGFGSLCNISIDKDQLSQLQKNLVMSHACGTGERVPAEIVKLMLLLKIQSLSYGNSGVQLETVQRLVDFFNNDVLPVVFQQGSLGASGDLAPLANMCLPLLGLGEVEYKGARRPSDEVLKEFGWKPISLQSKEGLALLNGTQFMSAFGVYSLIKARRLSEWADLIGAMSLDAFDGRINPFIDEVHEIRAHKGQLTTARNFRRLLEGSEMIARPKKHVQDPYSFRCIPQVHGASKDTIDYVGGVLETEINSPTDNPTIFPEKDIIVSAGNFHGQPIALAMDFLAIAVAELGNISERRIYKLISGARELPSFLVAKPGLNSGFMIPQYAAASIVSQSKGLCWPASCDSIPSSQGQEDHVSMGSNAATKLYRVVLNTERVLAIELLNAAQALEFRRPLRSSKPIEDLLAAYRKHVPFVENDQVMYTLIDASVKFLQTEKLMTVKEFQEQIKAGIPDVLPAPKPYDPTINHAPKRKEILTEEERVLAIRNALRYFPAKHHEVLAREFAEELHKYGRIYMYRFRPDYEMYARPIEEYPHKSRQAAAIMVMIQNNLDKAVAQHPHELITYGGNGAVFQNWAQYLLTMQYLSQMTDDQTLVMYSGHPMGLFPSHPDAPRVIVTNGMVIPNYSKPDDWERFNALGVSQYGQMTAGSYMYIGPQGIVHGTTITVLNAARKRLTEGKKDIRGMLFVTAGLGGMSGAQPKAGNISGVVSITAEINPKAVHTRHSQGWVDEVYTSLDELLARAKKAQENKEAVSLAYQGNVVDLWERLAAENVNVDLGSDQTSLHNPWAGGYYPVGLSYEESNRMMAEDPEEFKKRVQESLRRQVAAINKLTAKGMYFFDYGNAFLLESSRAGADIMGEGGRFRYPSYVQDIMGPMFFDYGFGPFRWVCTSGKPEDLATTDRLATEVLEEIRKTAPKEIAGQLDDNIHWIKEAGKNKLVVGSQARILYADSEGRTKIALAFNDAIARGEISAPVVLGRDHHDVSGTDSPYRETSNIYDGSNRTADMAVQNVIGDSFRGATWVSIHNGGGVGWGEVINGGFGMVIDGSEDSARHIKEMLLWDVNNGIARRSWARNEGAMFAIKREMERTPGLKVTLPNLADDKLVRKAIDEVKMEKRIIECVPNFSEGRNKAVIQQITSAIEAVDGVKLLDVDPGEATNRTVVTFVGEPEAVLEAAFQGVKKAAEVIDMRNHKGAHPRMGATDVCPLIPIAGITLEECAELARQLAKRIADELHVPTYCYEAAAFTPERRNLAVCRAGEYEALPEKMNHEGKAPDFGDRPFDEGVARTGATAVGARDFLIAVNYNLNTTSTRRANAIAFDVREKGRPVREGNSPVGKPLKDENGKTIMKPGTLKATKAIGWFIDEYQIAQVSMNITNISVTPLHVAFDEVCRAANARGVRVTGTEIVGLIPKRTLIEAGRYFLKKQERSTGISEEEIIRIAIKSMGLDELKPFKPEEKVIEYLIEADNKKKKLVDLTCTGFAEETASESPAPGGGSISAYMGALGAALGTMVANLSSHKPGWDARWEEFSDWADKGQKLMTELLHLVDEDTEAFNRIMNVFSMPKGTDEEKAARSAALQEATLYATQVPLRTMQTSFKVFEIVKAMAEQGNPNSVTDAGVGALAARSAVLGACLNVKINAAGLKDRAVADDLIGQANRIVADAEKAEREILEIVESKIKMKEIQTKRTPRFRRWCRKGYAAFASLRRQVTIGVLSVSMSTILLSTTTPVQAQTVDSLTIARELEIETVEVTGVKATPTRSAMSSTSVFDRKAGASAPVQTLESVLRLSPAIDLRERSGRGTQADIMIRGGSFDQTMVMLNGINFTDARTGHQSHSLPIDIDCIAGIDLIDGVSGVGAYAGALNIRTMPLKSRYLRIEAAGGDDGYAYGNLSGAVTKGRFSLFAAGSYRRSDGYIHNTDFENYNGYLRMNYDSEKAGFFDFQAGYQNRSFGSNGFYAAYNPDQFEHTSTVLSSLRWVKSVGRFTLNSSVSYRKNFDRYDWTRGTPMNHHNTDNAGAEFWADCTWKGGVTSLGGDYTYNHIYSTNLGEPLPTPHGKYTHAKDRHVGNLWLRHVKQWERFDVSGSAGVSFTPYGTSALWSLSGGYRPVRGLRLEVGAAQSMRLPTFTDLYYTSPAQLNNLDLKPEHAITYRFAADYARSGWNASLFTYYRQGRDIIDWVWREELGKWHSEQESKLDTYGLEVSGGYTTTGFLHRISVSYGYIHTSKVDRVITSSALDYMKHKAAATVEFRFLRNCSLTLTGAVYDRNGSYTYYLRNADGSLMLDPDGKMMTEVRDFKPYFLLDGRLSWEKKGWKLYFDVMNMTDTRYFDFGGLEMPGVWFSGGIVVTIGMNEKLNADKERLKADLSDTVQDVKEHVAAKAGQVKEQVVAKAGQVKESARQQAQQLKGQAKEQAGKVLDKTKELVDKASEKVKEWMFFLWYLLIGLVAGWLANLIVKGRGSGLIVNLVVGIVGGVLGGWIFSLFGLFAVGTIGSIVTSVVGAIVLLWIVAAVGNKKEKKIDMIKNICTVILLLLSVLPAAGQNRVKVKISGNVITTDGAPAEYITVSLKNTVFGGMSDGDGNFEFAAPPGEYTMVVQSVTAHRKEFPVTIETGRENVFPNIEVKEDINQLEEVVVTGQFSPQSMKNSLYKVRSVNSDQIRQKAPLDVQSLLNTEIGIRLSNDMALGETDFELMGMSGNNVKILMDGIPMIDRGSTKQSLSQLDVNRIERVEIVEGPMSVVYGTDALAGVINIITKKGPGYSGESTWRVGARIQEETMGKEYQFFNGEGLHNESIDLGFNLKNGLYFNGGYTRNDNGGWQGDLTGREKRWHPKDQSLANGMIGFQRRNLNVWYRLDFLDEKIFGPLNGTAIEPEKVSDKDYLTKRYTHQLQADWRLDNRLSVNLALSYQDYKRRTQTTWTDLSTGEKWLSAEDASQDVTQYKAWIARATATWNIGPKISLQPGLEYQWTEGKGGRIDGTPTISDLAFFISAEYKPWSWMSVRPGVRAFLMADYEAPVAVPSILTKFDLTPDMDIRLSYAYGFRTPTLQELYFSFHNDNHDIDGNPDLKAEYSNNVTGSFTYRILHNARIRLTTTLSGFYNVFKDKISLAQNVDIPNYNTYYNIGRYKTLGGALETSLAWGGLRVNVNASLIGRYNKYASDDKSLPQFRYSPEVSTTISYHIAKSGTDISFFYKYTGQRKEYYYHEYTTPDNKKESEIYLRGLPSYHYGDITVTQKLTSFLSLNVGVKNLFNLTDIRTIVESANDTPSVSYLGCGRSYFIGLNLMLNGKFKKMKRLLYLLSACLMTFGFSACNDDDDNLKLQDISVEFAVSEAGMDGETVSLGLKLSRATTESLDVTMEMTSSDVSDADITTTPAMTDGKITVNIPAGQSTGTFTVAKATGKNPEGTAKFQILSLSLTEGYKIGTTKEMTLSFTPIVSTGGTMTLEGKVGDQNYANMVYVDLSNNSQMQIDRKSWNLGFYCGDEFRVVLNSSYATVAAASEKTDFAAVTLEDAQSAPNIAAGSMSEDFKAEWIDDVTGDLSKTAFGEISATDANNKVFFVASADNKTNTDGTENRSLWYKVKVTRSGNGYKVEYGKVEDTTPKTVEITKDPIYSFIGLSLETGEQVLQPAKSKWDIMWAYAASSTMMASGPVISFTQDVITINNLGGAETAIVMTDTKSYADFKRADVASAEFQTEANTIGTNWRTPAMPGVENPGVKADRFFVIKDCAENYYKLRFLKFGSGDDGERGRPQLEYELLKMAKNKKWILAAVAVLAVVLCCWAAWSKWASTTRIGLVNFQNYQTASLVKSNEDNFIEYEEIPLDRLDRLGRYDLVLGFGMGLKITEEQRAQILAAADEGTPIYIYAATNPENDICSLDSLTKAGISAYIGNGNKRNYRNMARYVRQHIDAKRLFVTPAEEAVESASDVLYHLDEDLSFKTVADYEKYLREQGIYREKAPKIAIVGGLNDPFSGNRANIDSLIVSLQNAGMNVYPVSSYRQRLTFLREIGPDAVIHFAHGRMVMGQADAAVEWLKERNIPIFSPLSMLETQEEWESDPMGMFGGFMSQSIVVPELDGAIYPYVLNDQELDEEGIYLFKAIPERLKNFTRIIGNFISLKRKPNAEKKVAIYYFKGAGQSSLTAQGLETVPSLYNLLKRLKAEGYTVKNLPATEKEFEKLLMTQGAVLSTYAEGAFDDFLKNGRPALVGKSEYESWVQDALPEELYADVVQLYGEAPGRYMSTVREGEPCLAVARIDLGNVVLLPQPMAAVGDDAFAIVHGAKTAPPHPYIGAYLWAQYGFGADAMIHFGTHGSLEFTPRKQVALCRYDWPDRLVGTIPHFYYYTIGNVGESMMAKRRSYATTISYLTPPFTESKTRGQYKELMNKIEAYYKTDEARQPEVSIAVKKIAVKMGLHRDLRLDSLLTQPYTAEEIARIENFAEEIANEKMTGQLYTTGVPYSPEKIRSSVMAMSADPIAYSVAALDRQRGKVADTQLKSQAFFTQHYLEPAKQLVRQVLGGQKADDALVCRVAGITPEKLAEAHTILTPPRRGMMMGRAATPAEYTADQKREAQAIAEVERTVTNIQNYKRALEESPEMEMRSILNALAGGYVAPTSGGDAVANPQAVPTGRNLYAVNAETTPSEQAWAKGKELAENTLAQYKKTHGDYPRKVSYTFWSSEFIESEGATIAQVLYMLGVEPVRDAYGRVSDLRLIPSEQLGRPRVDVIVQTSGQFRDLAASRLALISRAVEMAAAATDDRYGNRVAESTVETERLLVEQGVSPKDAREMSTQRVFGGVNGMYGTGIQDMITSGDKWTDEQEIADAYINNMGAVYGSDEEWGEMKAGLLRAVLHNTDAVVQPRQSNTWGALSLDHVYEFMGGMNLAVRNVTGKDPDAYFADYRNRNNVKMQELKEAIGVESRATIFNPEYVKEVMKGGASSASQITEVVTNTYGWNVTKPDVIDKEMWDRIYDVYVQDSYGLGTEQFFRQQNPAALQEITAVMLETARKGMWKASEQQLNTLASLHTELVEEFGSTGSGFSGGNAKLQEFIAGRVAPQHAAAYKQQIQTMKTVQSPDNKNGMVLKKDEVSSGEQGRKNALNGVWIAGGVLVLFVVLLLVLRKKRKDNMQLIISVLILFILINCVLKLSFWRIWQAALFGAVCGAFVIATYPYAILQSKTQLADYLQNTTALQNMAVIITLESVVCFAYCIAVLRGWFGQQERWWVKPLKWYPSLLVFPVLFYLQTELVFSFPGTSFSAISYAFAAAVVVLFPLLCHLFRLLLPEKEMRLETHFLVSLFVCIIGLLTTVNGNVTYPAVDEPTNWRALGFAFGLFLVLFVLGALWNRIKWIVLQKRNARKKHSAQPRTVINSKKSMETISQVLFWVANSLLIPDILLLLLLFIRALLLVGGIYNQYMAKRKNDKRLNDLIKNLTPDKVDDLRKALPAKDNSLYIRYLRDLLTNPASQDYADYLISNFENDAEKDVILSKLLTKIGPVLGLIGTLIAMSPALVGLSTGDIAGMSYNMQVVFATTVVGLVISGVGLVSLQFKQRWYAKDVNNLDYVSRKLIEKNTEAMKPTRRKSKFAVQEDSDPLSVVVNLFDVAMVFAVALMVAMVMHMNMTEVFTQEDFTVVKNPGKENMEIIMKEGNKINKYTPSEQQGSGAKGKRVGIAYELENGEIIYVPEMKKILVSLICCLTATLGWAQEKNAYTLFDAQGNRVDYTQMMDVLERQDVVFIGEIHNCPIAHWMEYEIVKDLYDRHGDRLMIGAEMFERDNQLILDEYLAGMITPERFNAEAKLWPNYKTDYSPIVEFAKEHKIPFVATNVARRYANMVAKGGFEALDGLSDEAKRYVAPLPLNYVPNKSVDEYFGAMKMPGMKQSAAENLSKAQAVKDATMAWSIAERMQSKLVHMNGNFHSTDHSGIITYLNQYRPGLKIGTVEVIRQENTDKLDPEALGKADFFICVPKDMTSTFMKDFTPTSYTLECVATGREFPDEGWTLDDAQCKCLSLIRTRYAKKQLELKSDEYGFYKFADWLPVRRMLENSKAPVTYKSKGLAAHLGLENLYITFNGYYPAIGAHMTTCSFKETEAYSVCARIDENEKRVLVVASAGNTARAFAKVCSDNRIPLLLSVPADNLDALWFDEPLDPCVKLICSEKGGDYFDAIHLSNLALKSDKFYAEGGAKNVARRDGMATTVLSAATTIGRIPDYYFQAVGSGTGAIAAWEANMRLIEDGRFGSHLMKLMVSQNAPFVPMYNAWREDSRDMLHYDDDKARRDVEIIDAKVLSNRKPPYSIAGGLYDALKATDGEMFALTNAHARKARRLFLELEGVDIYSAAGIATASLIKAVEEGKIAKDAVVMLNITGGGELHFKEDKTLWYLKPDHVFPIDPDPEEVIAKTEALFAMIDFQKLPSPCFVLDEQLLDRNLAVIDRVRRESGAEVIVALKACAMWSIFPELAQHSDGATASSLAEARLVFEEFGRPAHTYAPVYTDRNIEAILDCSDHVTFNSVAQFERFGQMALLRGISCGLRINPGYSPVETDLYNPCVPGSRLGIPAGELKELPAGVEGLHFHVLCESRPEHLRLALDAVEERFGRFLDRIKWLNMGGGHLMTHKDYDCDELIRTLQEFKAKHPNLRLILEPGSAFTWQTGYLVSTVEDIVENGGVRTAMLDVSFACHMPDCLEMPYKPAILGARDPEPGEKGWRMGGNSCLAGDYCGEWIFDRDLQVGDRIVFEDMIHYTMVKTTMFNGVAHPAIAIVRRDGAIEIIREFGYEDFKSRMSMCKALIIGAGGVGTVVAQKIAANPIFSDVMLASRTKAKCDAIAAAIGGDRVKTAQVDADNVADLCELFRAFKPDIVVNVALPYQDLTIMDACLECGVNYLDTANYEPKDEAHFEYSWQWAYQERFKEKGLTAILGCGFDPGVTAIFTAYAAKHHFDEIHYLDIVDCNAGNHGMAFATNFNPEINIREVTQKGRYYENGKWVVTEPHEIHKPLHYPEIGERESYVIYHEELESLVKNYPTIKRARFWMTFGQEYLTHLRVIQNIGMARIDPIIYNGVEIVPIQFLKAVLPDPKSLGANYHGQTSIGCRIRGIKDGKERTYYIYNNCDHEKAFQETGTQAVSFTTGVPAALGASMWAKGLWRGAGVFNVEEFDPDPFLAELGPQGLPWVEKFDVDLEVMRIRFKQLSNGNQSIYLDYYTGDVIRKENYVGGKRKYEFLKLYLIPERTREDKAKNEVTLALAKAIQSKRIVEVQNDAHGFQNTNKSRVNLLDYLENIGKQSAEQGSRNYARTVLNTVRALKLFRGDYIAFRDVDKEFLSEFTDYLRQMPKASKYGVLKTGGRLSANSVVSYYGTLRTAINRAYKEGIITVNPTKEFDFASKVRQEPSRREYLTIDELKTLINTECRHEIVKRAFLFSCLCGLRVSDIRKLRWCDLQRSGGRVRIEITMQKTKEPLYLPISDEALKWLPERGEANDSDYIFPLTHEGTVNDTLQHWAKVAGITKHISFHIWRHPSSTFMSLLHSLHRNVKTIAMPMGMVVGALLCRPVTAAESMSNGMITPTLIFLMLFFTFCRVKPRQMRVKMLHVWLLAFQIVGSIVVYLSFVWFDPLLAQGAMICVLAPVAMAAVVIGGMLGANVTTMATYSLICNMVVALVAPMLLSFVGSDHATFLAILSRVGPVLVLPFVCAQLCRKFLPGVAFWVSKHSQISFYMWLVSLVFVIGRTTAFIIDLENAEPWTEIALGLVAMVICVVQFGVGRMLGRRYGDAAAGGQSLGQKNTVLAVWMAQSFLNPISSIAPTAYIVWQNFVNSYQIYKKDRKVMKNQIMALEQEISKGIMEAMKAKDTVRLTTLRNVKKYIIEAKTASAGITELSDAEVLKIIAKLAKQGAESAVVYAQQNRPDLAAEESAQVAVLQTFLPKQMTGEELTEAVRSIIAEVGATSMKEMGKVMGVASKKLAGMADGKDISAKVKELLSMTPTAVLLTVLGYIAMLFVVAGIAGRRVSNTGFFTGNRENPWYVAALAMVGAAMSGITFVSVPGSVAADSFSYLQMVLGFTVGQMVIAFVLIPLFYRLKVVSLYEYLDGRFGMTTHLTGAWFFFISKMFAAALKVYVVCTVLQVLVFDPFGVPFAVNAAFLVGLVWLYTWRGGVRSVVWTDILHTCCLVGSIVLCIVFIMRSLGLTSAGVVQAVCDSPMSRIFFFEDAGSARYFWKMFFGGVFTLVAMTGLDQDMMQRNLSCRSPWDSQINIVITAFSQMAVILLFLVLGVLLYLYAEHAGLPMPEKGDQLFAVVAVNGGLPLAVGIMFVVGLISSTYSSAGAAMTALTTSFTVDILRGPKRWGEGRLTQVRIGVHVVMALVMGCVVLFFGRFGNDSVINLIFKVAGYTYGPILGMFAFGICTRRRIRDRWVPLVAFAAPLLSVALQSFVAYKYDYHIGFELIAYNALFTVIGMSLLVERRPKPASDNMPLCLTGFSGDAGSWEFVSLVLKEMSNLMSEQIFRISYPMYGTDSRQHAVTYCFTTIKKIHSTPFSASFETITGAEIIYMAKSLKIRDLTLRDGQQSSFATRMNQAQIDRCLPFYKDANFYAMEVWGGAVPDSVMRYLNENPWTRLETIHKAIGNVSKLTALSRGRNLFGYAPYTDEIIDGFCRNSIQSGLGIMRIFDALNDVNNVKSTVKYVKQYGGIADCAVCYTVDPKYPEIGFFGKLMGKKNPKPVFTDEYFLSKAKQMEALGADMITIKDMSGLIPPHRVSKLVKLFKQNLNVPIDFHTHCTPGYGLASVLAAIVAGVDIVDTNCWYFSGGTGAPAIELIYVFCKKLGIDTGVNMEAVAKINTQLKEIRKELEISVFGKEKPMPKPFNPLTDELPKEIDAEFDRAIKAAQADDEETLLDACHKIEAHFGFPAPNELVKKAEIPGGMYSNMVAQLQQLKAEEILPRAMELIPTVRLAAGLPPLVTPTSQIVGAQAVSCALDEKAGRPMYTTKSSQFVALVKGEYGETPVKIDPEFRFKICGVREEIPYDTSKYQMQPNPELPEAGGVKLAANEKEVLLLELFPMVAKTFLTDQKKKAYEATAAKDTPKTAARSEHKVEAKAITGHKVTAPLPGKIIALKVKVGDKVKAGQEVVILEAMKMENSITSDVAGTIKQILVQEGDNVATDAILVEVEEMSFFKEFREFALKGNVMDMAVGVIIGGAFGKIVSSLVNDILMPPIGALIGNTDFSSLRLDISKVRDLSSKATHVVTDAIGSGTAESVPAEPIWWNYGAFIQQCVDFAILAFCVFLMVKMMNKLMKKKQEAAPAPVPEPSKEELLLTEIRDLLREQKKMVQAKTSDFQPLPLKILNVLSLLAGASLLVAVSWEILLGDPRHYSTDYLLLQGVVCVIFLADFFVRMLMADHRWRFFFRNLYFFLLSVPYLNIVDWMGVELTHAEAMLMGLVPLLRALLGLYVLFTWIINNRVTRLLTTYVLSMLVFTYFAALIFYDYEIEVNPALHDFGDAIWWASMNLTTVGANIFAVTAIGKILTVLLPTLGMMMFPIFTVYVTQIYTRNRKSDSMKALWIKIVLLAVALPGVWGNVAAQVTISADFDTGSIGSVRRIDSVRMLHAAKNSLEVMSFGIRSRIDPLNPVDTALLPSSRWFHFRLEGVKGKLMFLRIPNTEMVRPFYSYDGEEYLRFDAGECSLPQTVYKYFLHDTVYVAYFLPYSHARHKAKADEWACSPFVRRQRIGRSGEGRPIEMQILTDATVPDSLKRRVWIHSRVHTSEAPAAWYLEAMIDELLSDAPLSREILRRTVFYVVPETNPDGVRGGYSRSTAQGVNLEINWDRPDSLTQPEVRVLKRTIDSLSTERPFDVALNLHSQSAPFVTYWIHTAKSTSAKMYRRKMLLSALTVAHTPYYRPIDQRFSEAAPRYAEGWFWQRFGEKTLAVTFETPYTYYNNDPAGEWVSRESLAELAHASLLALSDLLDLGGSERRQADSERMKGRGKWLRRTAKDRQFFGGSYLVAERKGASVSFVFPDVAEGRYEVFKWIPGPLDKKFAREENRWQPIGEVVQEQAGRLVWRYQAAAPGDVLDVILLVPKSERMKNIVFDLGGVVFGRDPRKWEPEFMEFFAFIHAEKMPEFWVDYDRGTLTLDEVVRILSREKACDERVTARFIRDAIDRQEEIVETRALVGDLKRVGYKLYVLSNMSREFIDFLRKMPVYRCFDGEVISCEEQVVKPEPEIYRRLLDRYSLDPAETLFIDDRPVNLEAARTFGISTFLFRHREAQRSCDELRKMLLMKTERKRELVYSFPRRNLRKIVQGTGKLKYRFRTKQPFHLIFMKTDNTTLKKLTRGEEEVMQILWQLGAGSINDLIAAMQEPKPKYTTIATFVKILENKGYVGRTERGKSYEYYPLVPKEEYAKTVVSSILNSYFDGSLAQMVSFFSRREDLSIQETEQILAIIRQARHKTDKSMKEIVRYILETVVCSGILYGAYLLFLRNRTGYLAARLCLTGSLLAAALIPLLRIPVWPGKVIYATAGTPAETTFTAPSVSAAAFDYEAAIWIVYGCGVLLLLSSMFRQALLIRRLRRHSTQERIGRIVLVRPTAQIASFSFFRTIYISRSVAEKDIAAIFAHEKSHVIHRHSLERIVMESLKALLWWNPFAWLAARALTEVEEFEADRDVLAEGHDTGNYLKTIFTQQFGYSPDVADSLSNSLTNSLTKKRIQMMTTPMKSRYALLRLIAMLPIVTGLLAAFGFTSKAAEIRIQDKLPSAYTPTDPPAETAKKTASPENEDYDLLLVVDGEVTDFKTDPVTGLRSLTLPSGTYSIVGTEDLTPKMREKYAAYLPGKAAVFFYKKDTTGKASKVQIRVKPLTPRPPSAMPRSHSNRQSRCPHSRAEIMPSFQSGDMKAFHNWVNSQIRYPAEAFKNNLGGKVVAQFTVDQAGSVGDIKILQSPDKCFSDEVTRILESSPKWTPGRDEKGDAVKVSLVIPVDFRMTAEKPSGNMTLTIIIAIVAFLVITLALVGLLLFAKAKLTTSGDVTIDINGGEKVLIAESGGTLLSTLANNNVFLPSACGGGGSCGMCKCQVLEGGGELLPTETGFINRKMAKEHWRLGCQVKVKENLKIHVPESVLGVKKWECEVISNRNISTFLKEFVVKLPEGENLKFRSGGYIQIDIPKYDAIKFSDMDIEEPYREDWDKMKMWDLVTKNPEPTFRAYSMANHPAEGNIIMLNIRIATPPFDRATGTFAKVNPGICSSYIFSRKPGDKVTISGPYGEFFLPDNLPATQELVFIGGGAGMAPMRSHIMHLFKTEKTSRPVSFWYGARALKEVPYMDEFLEIQREFPNFKFHLALDRPDPQADAAGVKYTPGFVHNVLYENYLKNHQAPEDNIYLMCGPPMMISSVVKMLDSLGVPSENILYDNFGSMESLNIFIRSIFIDNMVFAFFFGMCSYIAVSKSVKTALGLGLAVTFVMVMTVPLNYLLYEYVLKADVLVPGVDLSFLTFIVFIATIAAFVQLVEMAVEKFSPTLYNQLGIFLPLIAVNCAILGGSLFMQQKVDALEITSLWQSIVYGLGSGLGWWLAIVMMAAIREKTTYSQIPAALRGPGIAFIITGLMGIAFMIFSGIKLMSNEKESIFSAKNLKYLTSPFSANNPVIVQILGICSALAVTVQMKPAIVMALSVAVVTGFSSMVMSCLRKGVPSRIRIIVQLVVIAALVILVDQILKAYVYEVSKQLSVYVGLIITNCIVMGRVEAFALGNKPWPAFLDGIGNGLGYGMILVIVAFFRELFGSGTLLGYQIVPESWYIANGGGYSNNGLMLFPPMALIIVGCIIWVHRSHNKDLQEKMAKKKFVCSICGHVHEGNSAPDTCPVCQASSSAFTEDRSGRKKGWMHNPNSNTYIIVYSTVMVVIVATLLAVASLSLQKRQAENELQEKKSNILQSLGYSPDENPQEFDRALADFDNQVKSFVLDADGVKTETPSKEVFAMLATNQNIRDNYDAKRLILFQTEDGRVVIPLIGMGLWGDIWGYVALEKDMDTVSGIVMAHKGETPGLGAEIATPKFQAHFAGKKLFKSGEFVSVSLRKGGAKDPEHEVDGISGGTKTSDGVTAMLRDCLSAYLPYFESQHQAAAQSAPAAANEAASSEVSNQQNVNESHEMGGLRKFVDKIKPTFSEGGKLSFLASTFDAFETFLFVPNTTTSRGAHIRDCNDMKRTMIVVVVALMPALLFGMYNTGYQVGMTGWAAFWFGFLEVLPMIVVSYVVGLGIEFFFAQKRGHEVNEGFLVSGLLIPMIMPVGTPLWMIALGTAFAVIFGKEVFGGTGMNVFNPALVARAFVFFAYTPFISGEKVWFADDAVSGATALEQLATSGAMSYSTADAFLGFIPGCVGETSTLAILIGAAILLFTGVASWRTMSFVFIGGLAMGYFFQALGVTTYPAWEHLIVGGFAFGAVFMATDPVTSAQTRTGQYIVGFLTGALAVLIRVVNPAYPEGMMLAILFMNALAPLVDYCVVESSISRRKKRVKLVKMSKIITLRKGLDINLQGKAVEKLVKLPLAPEYAVSPLDFEGVTPKLLVKAGDRVKAGTPLFFNKYNERVVFTSPVSGTVSAINRGEKRCILNVTVQADATQTYEEFAKLNVQTASREEIIDLLLKSGLWPMIIQRPYGIIADPSDTPKAVFVSTFDSAPLAPDYNFVLAGEKRNLETGIEAMRKLTSGKVHLGVRAGAEGEMAFLKGAEIHTFAGKHPVGNVGVQIHHVDPINKDERVWTVNIQDLAIIGRLLNEGRVDRTKVIAVAGSEVKNPQYYRLIDGAPVASVLKDNLKPTAHNPRIISGNVLTGRKTPADGFIGFYANMVTVIPEGNHYELLGWAMPRLNKFSVSRAYFSWLCPKKVYDLDTNLNGGERPFVVTGLYDKYLPMDIYPTYLLKAILAGDIDKMENLGIYEVVEEDFALCEFVDPSKIEMQQIIRDGINLMIKEAMKCSIVDIHTHRPTGKALEPSFAGIHPWQAETRRIEEIVPRFGEVDLVGEIGLDYAGTVGREAQLRIFREQLDWAERLGKPVVLHCVKAFEAVMRELAPHALRAVIFHGFIGSSQQAAEAIKKGYYLSFGERTFRSPRTVEALRRTPVENLFAETDESDVPIEEIYRRIAQAKDLDPELLKCAIYRNYREIFERMTDNWLERTELLLGAEKLEKLRAAHVLVVGLGGVGAYAAEMIVRAGVGRMTVADADTVNPTNINRQLVALHSTVGRPKAEVLAERLRDINPTLELHVVDKYIKDEETDLLLDSARFDYAVDAIDTLSPKLALILGALKRGIPLVSSMGAGAKTDPTRLEIEDISRTHHCPLAHMLRKRLHKAGVRSGFKAVFSAEPVREGATILCEEQNKKSNTGTISYLPALFGIGCASVVVRGVIGELMSDSYLKNKDTKSREKTGIVPVFRGAAYLTEAMSKIIIFRKTDLTASGWSMLVRIVRRCFAKIRISRAQKQFLFAFCRGGVSKTKSKIRKDGHMVPGTGNGGVSAVSGTDRDCRGLDGTVVGSASQPAGLSPDRTRAISFADCIVHLSMNIVFLDEYSLGGIDLSRIKQLGNYTGYEKTTPGEIAERCIDADIVITNKVPLRAEAIKVLPQLKLICIAATGMNNVDLEAAAERGIEVRNAVGYSTHAVTETTIGAAIALLRQSIYYDRYVKSGEYAASDAPFHFGRPLHQLYGKRWGIIGLGAIGHKVAEVAAALGCQIAYTSTSGVERQEPYPAMPLDELLRWSDIVSIHAPLNDRTRGLVGARELALMKPSALLINVARGGIVDEQALADALDNKRLAGAGIDVFSREPMSPDNPLLRVTDPDRLLLSPHTAWAPVEALETLVGCIERNIETFLAEQRMRKILYLWMICVVLCSLVSCNDSDDKTYSSYVSRFVWENRCNHRIEYFYVEGCITRSQGIKYGERAVKELEGPSPVDLQTFLDGRETHVIYDSFTEGVIIYCYMENYYPSGLGEVAVPKSLQDPDRYVYKAYEEGDKYVVEWTYTFTDADYEAARARGPVRIGIVMILPGSRIRFPGIFLKDSRNEVVFSNIIYYFYNEVKSAMKKFICCVAALSALIFSSGCGDDEKQVEPVDEYWIEWKNESDYRIDFFYVEGGYRWHDGINRGKYVSVRVSGSPEGLSDYIEDRKMGLWYEQFVVDGETYAYMENYDPSGSGNSAVPKGLQDVQRYTLVNKEKNGSLALVWVYTFTNADYEAAKARGAVHITLGEIMSNRKVLLMILDGWGIGDGQKGDVIAQVHPAYISEMTRKYPHAQLRTDGENVGLPDGQMGNSEVGHLNIGAGRVVYQDLVKINRACRDDSILKNPEIVKAFEYAKSNGVSVHLMGLVSDGGVHSSLDHLLKLTDIADKYGIERTYVHCFMDGRDTDPYSGKGFIERLEKHMRERSTGVVASIVGRYYAMDRDKRWERVKVAYDLLVEGKGEHSSDMALAMQKSYDEGVTDEFVKPVVRIDEDGNPIGMIRPNDVVIFFNYRNDRAKELTIVLTQEDMPQQGMHTLPLYYCCMTPYDAKFEGLHILFDKENVADTIGEYVARQGLSQLRIAETEKYAHVTFFLNGGREEEFEGEDRILVASPKVATYDLQPEMSAYEVADKLVGALDRQKYDFICLNFANGDMVGHTGVYEAIEKAVKAVDACVAKVVEAALRNGYEVVQIADHGNADNAVNADGTPNTAHSLNPVPIVVVSDRVKTVRDGILADVAPTVLDLMGLEKPEAMTGHSLVEFKMESNKIRQAFLDFFAGKDHVIVPSAPMVVKNDPTLMFTNAGMNQFKDIFLGNIPRPYPRAADTQKCLRVSGKHNDLEEVGHDTYHHTMFEMLGNWSFGDYFKKEAIGWAWELLTGVYGLDKSRMYATVFEGSPEDGVPFDQEAYDIWLQYLPADHIIRGNKHDNFWEMGDVGPCGPCSEIHYDLRDESEIAAVPGREMVNQGSPLVIEIWNLVFMQFNRKANGSLEPLAANCIDTGMGFERLCMILQGKKSNYDTDVFQPTIQRIAAMSGKTYGADEKCDVAMRVVADHLRAISFSIADGQLPSNVKAGYVIRRILRRAVRYGYTYLGFNEPFICRLVAGLVDQMGGQFPELKAQQTLIEKVIEEEESSFLRTLATGINLLDGVMAEVRKSGGERISGKDAFLLYDTYGFPIDLTELIAREQGIEVDLEAFEKELQAQKERSRNAAAVDTDDWKELIHIKQSEFIGYDTLSAEVKIARYRRVSSKGRVSYQLVFDRTPFYGNSGGQIGDIGYIETANERIPVVATEKENGLIIHIVTQLPENPEATFMAVVDPEKRQAAANNHTATHLMHEALRKVLGTHVEQKGSLVTPEYLRFDFSHFQKVTHEELRRVEQLVNRAIRANYPLEEKRDATKEEAAAAGAMMLFGEKYGDRVRMVRFGTSVELCGGTHVSATGNIGFFKILNESAISAGVRRIEATTGAKAEEVIYAAEDTMRNVADYLNNPQILQSIKKIMESNEALKHEMEAIRREQVAEWAAKIVDSTPERGGMRLMATQTDRRPDFIKDLAFAVRSRSKNIVLVIGSINDGKPTLTVALGDDIVAQGVNAGVVVREAAKAINGGGGGQPFLATAGGKNPDGIQAAIDKAVELIVEQVKMARKKQTFDPHALTREVVSATHEVVTVPFRLRTYRVIRKILIIFIAVSIVNVVFANVFYTPKMYRILRENSELVFKYRLLQDKIRAEQRKLDEIHHRDNFVYRALFSADTLNIGGIYTPYPASKYAALAGDEYAPLMIGTWQQLDAFGRQLYRTSVSFDELQILAKNKENMSTAIPAIWPIDRQALRRGIEPFGYRNHPIYHRRILHKGIDLAANIGNNVYATGDATVQSTDLGQPRRGYGKQILLNHQYGYQTRYAHLSQIFVKPGEKVVRGQLIGKVGNTGGVTGPHLHYEVIHMGQVVNPINYFNRNMTNEEYERLMEQMQELNLDTFDEMARTRRPIKYATPRTPKQKAIRITFHVLVWFGAAILYYVGFSLFFDTPVEYELKHSTDQLRDEYTRLEARYDSLRTVMENVSERDRNVFNILFESDPYDFDTEYETKRLATYESLLDKSDRQIILELKEKVRQSEATLTKLNESYLELQRLLDTVGDGRNRIPAIQPVINQQLTLLTASYGMRIHPFYRTLQSHQGVDYTVPEGSRVFATADGRVKEIATRSTAGRTIVIDHGNGYETSYSHLLAVNVRRGQEVRRGDIIGLSGNTGLSIAPHLHYEVRHNGMRVDPIHYFFMELSPVEYQRIIRIAQSGMQSFDMKKETAIYPSHRKLLGTTLAAAIMTTLSCLLVIVQPHGTFGLVIGIAGLIFFGGGFCILFIMLLKIFFRSKPTLLLTPDSLRIYVPAKGIYITIEWQRIADFSVFRTYGQKFIRIELHDPDRAIDEEKNRIAKGLMRWQMKYFGSPYAITASTVDIGTAELEKILREYLQASREKSAANMPGFLQEVAADLYDRYGDDISSLSVLFPSRRARLFFIDALSGIAERPLWQPRWTTIDELMSEISGLRIGDRVRLVTELYKVYSEFHPESFDKFYFWGEMLLTDFDTIDKYLIDADMLFRNLADIKELEADVSYLSPVQLKIIAFWANFTDETSLSEEKRRFLAVWQTLGPVYRTFRERLRSLGMAYTGMVHRAAAERIKAGGFAFPESRRFVVAGFNALSECEKRLFKFLSTAAETDFYWDYDTYYTDNADQEAGMFLRENRILFPARRELPHDHFRSPKRIEAISTVSNAVQCKYVTSILRDLAAEQGPLGKETAVVLTDENLLLPLLHALPAEIGKVNVTMGYPLKQSLSYSFVERLIELQNHARQKEGKPLFYHADVLGLLSHPYILESDPSRIVRMQEEIVRNRRITVAAEWLACTPLLATLFRSVEGWRGFSDYLLAVIAQIARMPYEDTEARRRVEFLNVISEEVIKLRNSLDNCEIELSISIYASLLRRHLQTLRIPYEGEPLEGIQVMGILETRNLDFRNVILLSMNDDNFPGSVVTGTSFIPYNLRAAYALPTPEHHEGVYAYYFYRLLQRAENVRMLYCAHADDKTTGEQSRYIYQLEYETPFEILRREVGIDVNRMETLPIEVPKQGETAEKLARFLAPDDPVRLSPTAFFRYVACPLRFYFHSVARLEPDDEISEEVDAPMFGTILHAALQRLYAPFVGKTGYGEALRALTRSSEVEKAVVAAINENYLQDVEATVEDYSGNLLLVKDIVIRYIRGGVLPYDAAHDDFTVEGLEERIGQEFAFESAGKSLRVVFGGLADRIDRLPDGTLRVVDYKTGEPHLDFQGVEALFRGEAKQRQSNILQTLLYSMMLFHSRGVDAEPTLYYVRAMHRDDYSSRLVDRELGRTGVRYSEYREPFERLLRETLAEMFDPAIPFRQCEDAEHTCRYCDFREICKRMKRWILSLALLTLGFTASAQNDLIDRGELAPEIAAASGEKMEWLPSFNGVIVEGLFRIRFERVPMDQAPKIVFNTKGVYDSRFTAEVNKNKMLVISERIGARERSETEVTVYYNNLEEIRISGANATFGEPIDFPQARCWFSNGAVVSAALDVKDLQMDVTGKSVVVLTGKVRYWDLNVSTAQVDAAAVEVMSVRVNSTSKADVTITAPERLEASVGTKGRITCIGEPELLHTSNSLIGGEITFKMEAAGGIPLCGRFAAARAFFPAASMPVADEGCRSRMPAGMRARILNASAGSGKTYQLAYKYVRDVVEQPTLYRHILAVTFTNKATEEMKSRILSEIHTLASGGKSGYLASLCTELSLDERTVRTRAREARTRILHDYSRFTILTIDTFFQRILRAFIQELGLDLNYNVEIETASVLSKSADALVEQIRIDEELQRWLTAFVQERIEDGKRWDVREGILALGNEIFKESNRETLSAERSKAELDRIVGKATGRAKAGKKEFQELGVRAMNLMNTAGVTTADFTGKSRSFAGYFAAAAAGEIKAPTATVRKMSATTEGWCAKDSPALPLVAELQPLLAELCARYDRSIRFWNTTDLLRENYRSFALLQDLYGKVRQMCSDENVMMLSETKNILSEFIRHNDAPFIYEKVGNRYDRFMIDEFQDTSTREWENFLPLLGNAMAQSEQTSVLIVGDIKQSIYRWRGGDWEILHRRAARELGEASTETIHLKENFRSLPLVVEFNNRMIGKVVESDNTALNQLLAQAPPHALGEKAREELRDTLQEAYREHAQSARKKGLHPGYVNITHYTGEPPLIERIKALVDKGFRPKDMMILVRSGTDGAKVASALLDFKRRNTDPRYRFDVMTQEALIVGTAPISSFVITCLKLAMNPADSLSRAIYNHFSAKPSFDAELTEEEVVFLKSLRLFPPEEAFERIVMRYDLQERREEIAYLQAVHEQIINFCAGRVADIPLFLKWWDEQGSGRSLSVEQGETTIEITTIHKAKGLEKKVVLIPYCNWTLNPKSSGLSANIVWAESTDGELEEIGRFPVRYKTSMGESLFSAHYYREMIYAHVDNINLLYVALTRAVESLHIFIPQKGAKGPNVGQLILQNIAPEDGTVRLDGLEGSYSRDEAAETYEFGEFAGPEPDTHRKAKAAHVLLGDYPTSEPQLQLRLPTERYYEEEGRAELTPRDFGILMHRVFENAATTDEIYMAIEAMTQDGVLDEKEAPRLRELVEKALADPVTAEWFGGRWQVVRNENEIILPGSGTTRRPDRVMTDGERAVVVDYKFGDRETARHRKQIREYLRLLRQMGYTRTEGYLWYVRLGRTERVEEKEDMRSILLDIIPRRFRRRSYLVSGTIFLRALLNFAGLALLIPVLLLILDSESMHTNPWLERLYQAGRFESDRAFALTVCGCIVALIAFKNLLNLFLLRYERRYIYDLYRCMSRRLYIEYHDRGLGFIKNTNSALLSRNVNFVCLAFVTGILVPLASITSESMLLALLFTALLFYNPTVAGLVLLVFIPTVWFYYSAVRKRLHRYGVQENEAQREKARTVVETFRGYADLEINDAFPSMLRRFDRAMDKIVTIQSRNMTVNALPSIFMEVGLAIGMALFVAVSLGTPGDEARVLFGVFAVAGLRLMPSVRNMMSGWSALKYNRYTIDILRDIDLNDEKPEPSAAQPPLPFEREIAVRDLSFRFDDERGDKEVLHGLTLTIRKGEHVGIRGASGAGKTTLFNLLLGFYTPTGGEITIDGEPLTAANRRRWQNAVGYVSQHVFLLDGTLLENIALGEEEEKIDRRRAEESLRAARLEDFVQSLSAGIDTPIGEAGNKLSGGQRQRIGIARALYKQANILFFDEATSALDSGTEEGINRSIAELSQHNRDLTIVVIAHRESSLEYCDRIITLDNNGMDREYIIAGFRIRLEQADRLFVRPGSHMARAFEPFAAEADPAAPLTMRLIPDCTINKKLTGGEPNRELDVFPFDDAEADCHFERTPRGYLFRMVPRNGDRPTLFFKAFDSPDVQSDLLADGREPHQSLMRFGLWIMFGIAISPEAIAIHSSTIECEGRAVLFLGESGTGKSTHTRLWQEHIPGARLLNDDSPIIRMYQGQATAFGSPWSGKTPCYRNISRPIAGIVRLSQAPANEITRLSILRAVGSLLPSCPPAFAYDSDLQDRICRTLSDILTQAPVWHLACLPDKAAAELSYATVLEGKQRAMEKTVANRIAFAQTRDLLLEGQNVRICVQGQSMLPFFRSGSVITLRPLRHEDLRRGAVVMAETVQGNFVVHRIIQATPEEVTLLGDGNLTTETMPPAKVYGVVDCSAIHRVLARVWLWLRPVRRYPLWVLRRICRKMIQNSRTFNWNPIGTYCIMSTQRQAVLCSNPIFEIRGGQNLKKQRAMRKIILSCLLLGISLTTYAQTSLFDLWQEASEHVNIYTYGLKPVKKDPCFRPDWKQKRGTKLEISSPTIGLLKKMLEDVESEGFQFNPQNDTLLFYVSFCSWWAPCDLVVKTSAGISHYYKPTESRLRLISVMLAEDFFISSILYYGDNSAFTDFFRRYVILDSDSYAADTLVFRIILKDGKIMTPSEVWKIADVYMWGGNYFTEDDIIFLKKLSRYYNKSDLNRLENFSRTILLQMEIKAADVMKLRKMTGAGMMDCKKALAEAEGDFARAQDIIREKGKLVVAKRADRTATEGVVVTKIVGQKGYILCLACETDFVAQNAEYSASANAMLDVAVKTDAADRDALLAAKNAEGRTVEEMVTEKSGQTGEKIELAYYARIEAPYCHAYVHFNKKLGTLIGFNKVVPEEVAHTVAMQATAMAPVSISEADCPADVIEHERKIAVEAMKQDPKNANKPEAILEKIAEGKMRKFFEENTLLNQPVVGEKETIAEFIHKADKDATVIAYKRFALEAMSRTDFNTLLEAGAHFGHLKRKWNPKMAPYIFMEKNGIHIIDLHKTVLKLDEAANALKQIAKSGRRVLFVATKKQAKEIVAEKIAAIGMPYVTERWAGGMLTNFPTIRKAVKKMSTIDKMTNDGTFDNFSKREKLQIARQRAKLEKNLGSIADLTRLPAALFVVDVQKESNAVKEAKRLNIPVFAMVDTCCDPTDIDYVIPANDDATKSIAVILDAVCGAISEGLEERKLEKEKEAQENEAHEGDAPAKKDAKPRIKKAVKASVDAEEAAVAEVVAATEQKAEMEVVNTVGRRKAAVARVFVKPGKGEITINRKSLEVYFPLDILQFQVKQPLLATNTAENYDITINLDGGGIKGQAEAARLGIARALCEIDAEFRPVLKKNGFLTRDPREVERKKPGQPGARRKFQFSKRMDSLSYKTISANAATVDKQWVVIDATDEVLGRLASQVAKILRGKNKPSYTPHVDCGDYVIVINADKVKLTGKKMTDKVYTRHTGFPGGQRFATPADYLAKKPTFLIEKAVKGMLPKTRLGEAIMKNLKVYAGAEHPHAAQNPKAIKLNEIKMAFLEYIDVICSGVLLFADFLRIFAHPYSAGGWINKYMKKFLFYAVSLLLVLPAMAQTPADAPGTTTSTPPAEGLVIADGQVARLKKAPSFKNKGFEKYWKWVLSRVQYPADMEEQKVEGVVQVRIIVETDGSVTVDEVLASPHEKLTEAVTRVVENSPKWTPGIMTDKESGLDYPVRVSYVLPVEFKVRPQKLVDPTIGRYNGQKNFKPYGSMSKIARGKSNCENLFSKIAEPNPIFYKDRKSRMQKQIYLHFPEAEFMMLTAGSISLSDSLVDFFNQTGFAGATWGNIAMILVAFLLLYLAIKHKFEPLLLFTIAFGMLLTNLPGANMFHSELFAGGHIHWGSFIQDAGLLDYLYLGVKLGIYPCLIFIGVGAMTDFGPLIANPKSFMLGAAAQLGIFVTFLGAYALGFTPAQAGSIGIIGGADGPTAIFLTARLAPELLGPIAVAAYSYMALVPVIQPPIMRLLTTKKEREIKMSQLRPVSKTEKILFPIIIAVIISLLLPSAAPLIGCLMLGNLMKECGVVDRLSKTVQNELMNIVVIFLGITVGATATAEAFINVQTLSILVLGVLAFALGTAGGLLLAKFMNLFLPEGKKMNPLIGSAGVSAVPMAARVSQTVGQEANPSNFLLMHAMGPNVAGVVGSAVAAGILLSFLGMKDYSLKINGNQYDISIEDVNEESTMANVTVNGVAYEVEIVGEQASKMKKPQVVPAPKAAGLSVTPTTAAPSAPKAAQAAAGGPGLQVKSPLPGTILSVNVKEGDRVAPRQTLFVLEAMKMENNIDAERGGVVKSIHVQKGATVMEGDLLIVIEMTQIDWSGILTITCVGFCLVIVMLLLLVFVMKGFGSFFTHQRKKQSPSQTELDEETVAAIMTALKLFGSARHDRETEMLTILSIKRAYSPWNSKIHGLTQMPDYRKMSEIQNQINQLIENREMARMGGGQKAIDKQHEKGKYTARERIQMLLDEGSFEEFDMFVTHRCYDFGMEKKHTFGDGVVTGYGTIEGRLVYVFAQDFTVTAGSLSLSMSDKICKIMDMAMRNGAPCIGLNDSGGARIQEGVNALAGYANIFQRNVMCSGVIPQISAIFGPCAGGAVYSPALTDFIIMKKGSSNMFLTGPKVVKTVTGEDVTQEQLGGATMHTTKSGVAQFAVETEEEGIQLIRQLLSYMPQNNMEDTPMVVCTDQINRLEDSLNEIIPDNPNKPYDMAEVIRAIVDNGEYLESAADFAKNIITCFARFNGQSVGIIANQPKYMAGVLDINASRKAARFVRFCDAFNIPLVTLVDVPGFLPGTTQEYGGVITHGAKLLFAYCEATVPKITVTLRKAYGGAYIVMSSKHIRGDINYAWPTAEIAVMGASGAVEVLHAKELAAFESAEEKAKFVAEKEQEYRDKFSNPYNAARYGYIDDVIEPRNTRFRIIRALQSLATKRLQNPAKKHSNIPLMKVSHIEHLGIAVKSLDESIPYWENVLGLKCYAIEEVADQKVRTAFFKLGQTKIELLEPTSPESTIAKFIENKGIGIHHMALACENIEEQLADAAAKGIRLIDATPRKGAEGMTIAFLHPKSTQGILTELCENKNKMSFTDNRFVFPFFPCICRKVGIVPTKIVFLLAYSDISSIFVMERDAIDFGSLKVSVLFRRLFIPTLCGMLSISAVTVADGIFVGQGVGSDGIAAVNIYVPLLMVFQGMGFMIGIGCSVVASIHLSQSKIRAARLNVTQAMVFVTAVTLLLSSAILLFPDRTAVLLGASEHLLPLVKDYLLWFTPALVFQMWTAVGLFVIRLDGAPKLAMWCSVISALLNVLLDWLFIFPLGRGVMGAAFATAISVSVGGGIALWYLLCRARSLSLCPLKGSRKSLRLSLRNVGYQCRIGSSALLGEATLATLMFTGNQVFMRYLGDDGVGAFGIACYYIPFVFMVGNAIAQSAQPIISYNFGAGASGRVIQARRIALATAVVCGMTAMGLFVCCPRILVGFFLDTDTPAALIAIEGFPLFASGFVFFIVNLTVIGYYQSLERVRAATTFALLRGFVLLVPAFLLLPRVAGISGIWLAMPLSELLTCAVIAVFYNLRRGFGLRFSMENIWGPQRKTGNMEEESLREENRKAHEEDERFRMTAVKAAGQVRQRMRCATGESDEVIRRKFMLPERYILTLMTVETLGQERMLLDLMAGGRLGADLVLCGRRSFYADMLLRTARDRRLALRTNFIYEYSPEELSAFFRMADGLVYLPRKRGRVQPVVEALYAGIPAVLSDTRRNRLTAGDAARYIACPELDELADTLDAILSDSGLRRQVQGCCLRRVERWKTPDDNLRTREMPMKRVLLLLTVVFCTLGASHAQNIVIGERAPELKSVTWLASRNPAAADLSFLVFFHSSNKGCTASLDALRDLSNKLGSKLRIIIITQEDSDKIAPILTPYISERIGVALDHDKKVFGSFGVDFVPFSVLIDAKNRVLWMGNPQSMTSSFIQKIVQMSFTKINHYEKEYADTHHECALTVTEGVENQPVVNPYFVRKKKRALTTEEYVEGILQGNITTLSQAITLVESSNPDHYAQAQEIIEKCLPHAGKSVRIGITGVPGAGKSTFIEAVGNMVTSLKHKLAVLAIDPSSERSGGSILGDKTRMESISSNPKVFIRPSPSAGSLGGVARKTRETIILCEAAGFDVIFIETVGVGQSETAVHSMVDMFMMLQISGAGDELQGIKRGIMEMADMMVITKADGENIHKAELAKTQYQGALRLFPVPESGWRPKVYTCSAYTKTGLEEVWKGVEEFLDFIQANGYFTHNRNRQNKYWMYETIDEVLKNSFYHNPQIEPRITELEQKVLDAKVSSFVAAHELLELYFKNKNMKHVKLFAALLAFVMLGACTESPEEGGGFLPSMDYKLTDNREEGATTTVSQSFDYDEENRVARITENYHSTDEYSYKDNGTEIYTFDYTIANEVSVRTTDEAERLLYKISAKTDAKGRITETSSYDYDNGTPRLEGQETYTYTPEGRLSSLLSKYSYSSSSGLNQYSENKFYYTDGLLTRYTYYDSYEASYDPDYQPWEYSLPADECYPHRYANDRSNLDFYMYAMGGRISFENTSSAIFSLLRLTGNYGDCLPEITTAADEDDEVGVDEGAYPTPNVTLHKSYTTTESACGEDEYLKLRIETDADNAVKRISYDVPYEEYQVEYDIVVGNEVIDEAMNHPEFPEEEKLYKYEIKNRTKTKIRDIVNPATIEITYRMKKIVVFTGAGVSADSGLATFRDSDGLWANYRIEDVCTPEALRDNRAQVVDFYNMRRREMLGKEPNAGHRAIAGLEKCFDVEVITQNVDNLHERAGSSRVTHLHGELTKLRSSRDPELIVPIDGWEQRLDATAPDGSLLRPHIVFFGEAVPMFERAAEIAGTADLMVVVGTSLAVYPAASLVRYVRPDVPIFLVDPGNPDTAMIRNPLTHIRSRAAEGMPELAERLKSEFSMRISFMRWRPGSDGREPRERRKWLEINGVPSRARFRMFIRNRLWIGLPPAFVAGFGVVLLLLVSGGESTPERSLVRASIAGGLCVFGWILGVWAATGPDPEADSNAENPEQASGDRFAPRGLRWWLWVLCGGAAICYAVFSPSIGRIVEGERTVLEGAAEIVSKVLTVVCVIVPVWLAERARRMAKEATRSFVLRVDASTMEAVERWAADEFRSTNGQLQWIIMEALRRSGRLKKSRVGKPEPKPEKEMEKGNFVYSGWRANGFVALVGLLVLIAGGIALCVLGSDEMDPRIGLRTAMLVCGVCLFFISMFCFRGFMLLEPNEARVVMFFGKYKGTFYETGFWWINPFMGRKKISVRARNLNVEPIKVNDKNGNPVMIGLVLVWKIRPDEIYRAVFDIDASTMGGTDLAVSASARMKVLENFVSVQSDAALRQVAGYYAYDNNGVADDELTLRSNSDEINDQLEAKLNDRLSMAGIEVIEARINYLAYAPEIAAVMLRRQQADAIISAREKIVEGAVTMVKMALDRLADDRIVELDEERKAAMVSNLLVVLCADEAAQPIVNAGTLHHMILQIYHSIFNYATIFRKKSSARLKIQTGGAYNASVTGRGMKKTIFEHFGFWLRGVVCGALLLSAAVACSDDNDDPGAAAPEITLESVSTGQTEFSFRLRTNVDGAYGYQVVKRTQNDGIEKPDAASLFDEHTGTVNKETTVAVTGLETGCSYVLYAAVKAETLYSEVAELAFTTGVNSNEIIEVSDIGSDRFTFSIRCEGPYFFAAIPTATLNTYTIEEYLTEAGCIGRGEAEYDWVDGGEFSAENGTFSMKVIAGVPYVILMAPCDASYNITGEPQRLDFETLPRQGSGAEVEVELTEIASTSVKVGTSPGEGVAEYYVYVRDKEWYTNIIENNGGEAMAIHMIKYATDAGLGRKYEAVASEVWEGLKPSKEYYCGVVSVDFSGGENLQLVPFTTEESSGRVPLLEVEARKSDTNPSETLNLRIRSDIAYLGRYAVLAAAEVKNYEAQGKGDKEIISDVGTDLNIQEMEQVNTAEGYDIEVEFLYPGMEYVCIVAVRSLEDVEVYKRVTVRMDDWPSEARVESELFDVLPGTWTISYSYLDYNDMPQEIKDVEVKIEAGVDDKTCKEYRARNMLVLTGYPFQGGEPLYYSPADLMRESSWYSAAPELAYRDYGAKIFFHIGEGDEVTVPSSKSVYLYNWGDWPLLFVGMDYDKYQLAPASFPVEVSSDRRTLTIKQYVSGAEFEYGVYRPSVVMDGVKLNVAVSDIVLRKVDMTVTPSDDKTTYFAGVTESSSVEGLADEELVAEMVARSDFDKCLYMGKKDVSATGLKADTDYTVVVFSYQNKEVGAVVKKTVRTQKEGDGPTPGDFKIEITVTDITHNSAKVKVTPSDDTVDYYVNVFPKSEVERDGKMLEGWEFIEYYGQDPYIGNKTQKGVYERSLSGLSSSYSYVVAAYDLSQDEEVVYYEFLTTKAPDVPDQFQITNIQPTTTGVTFTVTPQSADEWYCAWITTKSTYESFEPESYIQGVYYGLNNIAVDKQMTMSDYVKSIAKQGTAEWSNYDGDLKPKTDYVILAFYVDPNNDDQLEVYDYAYTKAEFRTETPETEISLTLGDIKNLTDNGDGTAEVTVHVKASLATSYRIGAHTQTEIDEEIANGYGPEDWGDFWISWRPSSDVEGICSPEGADVTALIPFVAGQGYCLIFRVRSEDGNTKTEYKPLNKMNQKRNNDELLTTVFGSKEVLEPAPTDVIPQGMMRPEIAYQIVKDETYPQTQPRLNLATFVTTYMDEYATRLMNEAISVNYIDETEYPRIAVMNGRCINMIANLWNTPEKAQWKAGALGIGSSEACMLGGVAAWLRWRKRRQAAGKPFDKPNLVMSAGFQVVWEKFCQLWQIELRTVPLTLKNPTLDPEQALAMCDENTICIVPIQGVTWTGLNDDVEALDKALDAYNKKTGFEIPIHVDAASGGFILPFLNPEVKWDFRLKWVLSISTSGHKYGLVYPGLGWVVWKDKKYLPDEMSFSVNYLGANITQVGLNFSRPAAQVLGQYYNFLRLGFEGYKEIQQNSMDIATYCHDQIGKMKCFRNYADKLVNPLFIWYMNPDYDKKAKWTLYDLQALLQQSGWMVPAYTMPENLENLVVMRVVVRQGTSRDMIDMLIDDIKNAVAELEKLEYPTDSRIKYEKQIKQKGRVFTHMAAYFNIFLIVMALLALAVYIALHYFEAGYGYLFNRKYGFPIPNRIGWVLMECPVFIAMTVLWLLSDRTWEAAPLALLILFQGHYLQRAFIFPLLIRGNSKMPAGIVGMGMLFNTLNALMQGGWIFYISPADYYEGWFSKPYFYIGAALFVAGMVINLHSDYIIRHLRKPGDTRHYIPRGGMFRYVSSANYFGELTEWVGFAIASWSWAGAVFAWWTFANLAPRAASLYKRYEKEFGQEFTSLHRKRIIPFIYMSNLQDSVLFTPYRLGQVTLRNRTIRSAAFESMGKDFSPTQQLKDYHVSVARGGIGMTTLAYAAVCRSGLSFKSQLWLRPEIVPALRDITDAIHKEGAAASIQIGHCGNMTHYSTAGQIPIGASSGFNLYAYTPVRKMRRDEIMQVSKDFGKAVRTAHAAGFDCVEVHAGHGYLISQFLSPYTNHRRDEYGGSLDNRMRFMRMCLEEVMNAAPATGTSVLVKHNMYDGFKGGIEIPESIEIAREIERWKVNGIVLSGGFVSKAPMAVMRGLIPIYTMSYYSPLWLRAFIRYCGPFMIRQFPFSECYFLEDAKKFREALQLPLIYVGGLVSREGIERALDSGFELVQMARALVNDPAFVNKLREGDAATRSECDHRNYCIARMYSVDMKCCKHCGDLPRKIREELAKLPMTRKGTIEKGSRTALVTGAGSGIGRCMARRLAELGYRLILAGLDPAKLEAAAEELHEQYGLAVEVIPIDLARPEAAHELFERVQALGREVDVLVNNAGAFSFRDILQTPVERIERILCLHALTTTLTCRLFGAEMARRGCGGHILNMASYSLWMPWPGLALYSASKSYLRGFSVAFAKEVREQNIRVTAVCPAGVATDLYGLPPRWQRIGLRLGVLITPDSCARRALKALWRGRRCCVPGWWNRLFIPFCRLMPMCVLRVARKYTMKLQRMKKWIKILLVTLGIIAVLVVTTILLLPPIAKNYLEKHSKELVGRQITIEKLRFNVLNGKLRIDRIAMLEPDDSTTFASLGNFYTRIHLLPLLRQRIHIDAVLIDKPYLNVYQDGTSFNFDDLLNRFLTPADTVEKAPSNPWTVDIDDIKIHNGELTYKDMQRNVTWGFNELDIDVPGLHLSGHERTDMGIVFNFSRGGSLRTSLEYDQATADYDLSLLLSNLSLAGTAAYFNQVIDIGSVEGLVTLDLHVKGNANHLLDLRTYGIAAASGLKLRDSRDNRIIDVDTLNFDLRDGNLGTMQYDIRRIYAAGIRTQFEIYRGGGNNLLALIKAPEERPTETEATIDGETTVTIEREEPATTQLNFTVGELLLDKGEIAFTDNTFEKPFRYLISDIRLSSRDIDFSKQNELTLDAKLQRTGSGHIRWKGSLQNLDNHNLMVALSNINLKDFTPYCEHFTAYPLTGGNLTFRSQNIIADRFLNGTNHLDIFQCEVDKKRKDLEPEFKIPLKLGLYILKDRKGHVKIDLPVKGNLDSPEFSYRKIVMKALGNVLLKVVTAPFSFLTGGGDNLDRIEVDPLQFSLNTDQYATLDKVADILRDKPEMQIGLAQRINRSKAVGRLAELNLKMACYNSTLPAGERLSMIDFERIQATKLKSDEVMRFADSLLALRGIDGSKLSGSRKALTLYGDQAVGQLEKILVRRDSAIVEYLTRSQGIPVTAISVRTIPAQELGDYTGKDIYAIQLGMEEESIDVTDGNTAGDTETTDTSASATAEVLATVPEQAAVQLTQTGTAKETATPEPSAPTATATQSTQAETTITESEAGITTIKTPTAHPEELQTNEMLQGIENIVFDLGGVMIDLDRARCVEEFHKIGFTEIDDLIDSYHPKGFLGRLERGDVTNDDFYDYVRRSAGRDIADDEIRRAFTSFLAGIPRYKLQMVRTQRERGFRTYALSNINDVVFPFVRDVLFTQEGLQLDDYFEKAYLSYEMHELKPSPEIYRKMIEKSGMRPEATLFIDDNAENLHTAQELGFHVYMPRPREDFRFLFDDGPGRMGIRRLFIAESKGTRKKDSALSSGVLDFCTPNKRLVRKRSRATQSSFPDREKGYENIPFFISGQRHVTRQTNSDKKLPAEQLLFVYFPSRSYLTSREATQSRFLFLFSNGNSFIQRRMKIKSHSRTTFLRFVQGLLLSGKWRKATQSEASKNQSNLSFTGIFIVVNCRCSRRKATRTQRVSSGSSQFQVCPSSSENRHIIRLFGKTGTVAYRQGFSQPPTERSGCPTAHRPSIGTGGASSRNPVMHGAQNLRITQTHSMIYRYETDKNHRRTMEPPLIRLPSRQMLFEAARWAPSCNNAQEWAYYYTTREYPEAHARLAECLTGGNRAWAPDAPVLLVSCGYKNFPGTDVYNRHWMHDVGAANISIALQAASMGMQLHQMAGFDVEACARLLGLDTEKIEPVTMMTLGYPGPADRLAEPFRTRETLPRERKEVKSFVHKLEMTGRKLGLRKRIGLRLFSDLYAEKIAEHKLRTLFWECTLRCNLACRHCGSDCRVDPGVPDMPLADFLKVLDEEVTPHNRPEDVLLIFSGGEVLVRSDLEEAGREVTRRGYAWGMVTNGLALDADRLRSLMDAGLRSISISFDGFEDAHNYIRRNPRSFEKALDAIRLIVREPRLTYDVITCVTSPMVARLEEFKELLIAEGVKYWRIFSIFPVGRAKDDPTLAVTDAQFREVLEFIKRTRKEGRIDLSYACEGFLGGYEGEVRDDFYQCAAGVSAASIRVDGAISGCTSIRANFHQGNIYRDSFWDVWQNRFDKFRDREWARKGECADCKMWRFCLGGGMHLHDDQEHLMYCHYKRLQMGKKVKWALLTMLGFATACSTVKNAPQGGPQDQAPDSARVERQIRLMYGVRPPVPVEEVERQQAIREKTARKEVKKAQRAREKEAPASKNEMYQQRKVKSVDSQNFFAIIFARFLFLEKIVIFVHPYYLMTGQVKWFDSKKGYGFITREDGKEVFVHFSGIVSDSFKTLNEGQKVAFELGNGAKGEQAINVTVIEMSYKIRYDMTKRNEAIAILTGGGPAPGMNTVVGSVAKTFLQKGYSVIGLHKGFTGLFREAPATENITFLKADEIFNLAGSFLRMSRFKPSDEDFEKRFNWQFFTENNIKLLVTIGGDDTASTANRVAKFLEEKRHPIANIHVPKTIDNDLPLPDCAPTFGYESAKDKGAVIARAVYVDARTSGNWFVMSAMGRSAGHLAFGIGEACHYPMIVIPEMFNKTPITIDKIIRLMVSSIVKRRIVGMDYGAAVISEGVFHELSEAELSSCGIHFTYDAHGHPELGKVSKACFFSMLLDQRLAELKLNVQTRPVELGYEIRGQTPVAYDLTYCSELGIGVYKLFSEGKTGCMVYVDGCGNVEPLYLKDLQDPATGKILPRMVDISSDRFKAVVDNILMAITPPDYEAARQYLSNPEEYDFCKILGWDETDLMLLFLASLGCSDKAENTSPEAPSEEQPTPKPEKPEFVDKNTTMEENIGEEYPDCYYTYFRMQNASQENAIFFISTKMSASGDMIRIAPGEQGTWGQMMEKMLWIDDNDVLVKNLDALGFVQLYFNVPPITEDNYHAITPDVDTCAQYSFFDPMTESQRGTPRDQSAWVLEEFPDRPNAVRWTYRITDKDYKEAVRQTLERWADRDEEMELKVALCQFDMVWEDTAANLRTAGRMVAEADADLVILPEMFATGFETDPGRVAQPMSGEIVQEMTRWGRTMGKAVAGSLIVEEEGRYYNRLLFIKPSGERVQSDKRHLFSIGGEGANFCPGRERVVVEYGGIRFLLQVCYDLRFPVWSRCRNDYDAIIYVASWPAGRRDVWRTLLRARAIENQAYVLGVNRTGDDPRLHYSGDSAVIGCKGETLAEAGEGQRLLTARLDMDELRRFREKFPAWRDADDFDLKMILLLFIICIVNLITFYNVDYKYYKEHGEWNDHSNTYGGTFRNLTAACVTFAIAVALLLDKYLGMLKAGRTQTLTVNRISDYGLYLIDDEQNEVLLPNRYVSLANKVGDTLEVFVYHDSEDRLVATTETPKLREGEAGFLRVVDKNLHGAFLDWGLAGKDLFLPNRNQQGGVLAGRNCLVYLYVDSVTGRCVATMKFKSYVNNDVITVKPREEVSLLVASESPIGYRVIVNNRHWGMIYRNQLFRRIGVGDRLKGYVTRITEDNRIDVSLQQQGVAEVRHSAETLLSMIRENGGSLPLNDDSDPAEIAARTQMSKKVFKRSLGMLLKRGAVEITQNGVKLTGHNGMAKILTAERVSRDISDNYVFQRSQLAYHEAARRISGDVLEIGTGAGYGIEIVAPHASSFLTLDKIEPAGERPPFPHVEMRQAVVPPLDLPSGSFDYVISFQVIEHIKHDMELVREVHRVLRPGGKFILTTPNIRMSLTRNPWHVREYNPDQLRNLLGSAFASVEALGVFGNERIMEYYEKNRQGVRRITRFDVLDLQHRLPRWMLQLPYDLLNRLNRRRLLRDNDSLTRLITMEDYRIGPVADDCFDLFYIAEKQHKMKIDAKVQSISKLKDYFFLVPDYQREYVWKPDDEVEQFLIDIENEYSPDAKEQRNYFLGSIIIVNNDRCFDVVDGQQRLTTIMLSLCVFRDLLKKETLNSAQKNYLQIIENLLYNFDIESGETRVRLELQYEESHDYLTALIQEQPYNGVRSPSIERMQDAYTKILRHFQLYAGIDELIDFAKYCLTKIELVVIESQDLSSALKIFETINQRGAGLNAMDLVKNLLFSNTKESDFAKIKDIWREIIQNLQECSEDQKPLRFLRYFLSARYYNGILREDDIYKWIISSEGKQATQYEKHPVDFAKEIRCMSKRYSELVNATELQRDGCLYPHVTNIGFINKYKSRQHLILLLSLGSNADVPAIEYLAKQIESFFFFSSTLRIQAKTNESLFVQWAEKLRNLTTIDEIACVIEKTMLPYLLDKVGVFKAEFITLSHGVYNPLYRLRYVLGKIENTVLEKLHSPVCGHQFYNDLQIEHILPQSPKNGSIPLEFLSEEEYYSYVYRLGNVTLIESMINQAVNNYNDLSTDQWFYDKQSEYGKSSVCLTKLLDSKFYIGVNTALNRFKNDFQYNFTGWNKSSVEARQKILLELVFDTWRINDLRLDRVKMRIFYKCRSHNFLLRFVKSNTNNTNLNKKLENNRQFESGTIMYWTLELASKLEDAPWPATKDELIDYAVRSGLPLEVLENLQEIEDEGDIYESIEDIWPDYPSKDDFLFNEEEYMRNRSFGRGRNVRIVSYRYVCSKKMAEEIFILLICISRRILYIRNLIIRKLYVSLDLLSCELMIMKIYTKTGD

SEQ ID NO: 3 - protein, 775238 aa, Alistipes putredinis (residues 387,620-775,238 of 775,238)
  misc_feature (457713)..(457716): Xaa can be any naturally occurring amino acid
  misc_feature (601231)..(601278): Xaa can be any naturally occurring amino acid
  misc_feature (612282)..(612331): Xaa can be any naturally occurring amino acid
  misc_feature (615805)..(615856): Xaa can be any naturally occurring amino acid
  misc_feature (657652)..(657699): Xaa can be any naturally occurring amino acid
QGTTSLVGGERVFKTDERVEAYGSVDELTAFVALLTDHLRGDVGLEPRVWELARIASQLMTVAATLAVGEGGADKVKGIDAEAVKFLEEAIDRMQASVKPITKFTIPGGHRVVSLCHVCRTVCRRAERAALRADAKYGVAPEVLMYLNRLSDYFYLLGRTLTEYFSVEETLWIPMIVEYQQIAPVIDRRRTMLPNDPTTRFAACATVIGIHHTERRSCPGSPSRSSRQILRRKIPGQDHHVVRTRTIQAKSRIFRLVFPPRRNLQTTSALVDHKRRIAFFKLCIRQSPNRFGFAFTYRKRPVAAIEKGVLQLHRPPVKDSDPTQGIVKAVLSVAQSMKHKRFAHKSVNEWRVHAVPPEMTGPGEPVGQPGNTAKAAAMEEISQKEGAAVRLPYDVIVVGAGAAGMMAAGTAARNGHRVLLLEKMEKSGRKVRITGKGRCNVTNARPPEEFAGQVRTNAEFFSTAFAEFNNRATIRFFERLGVKLDVERGERVFPRSGKAWDIANALLEYCVDNGVKIVYDTRVTEIMTLNGRVFGVRYRNKRGFERKEECPRVIVATGGVSYPATGSTGDGYVFAADTGHAVEPVRPSLTPLVSSCLWIKNMNGLLLRNVRATLCIDGEAVREEFGELGFSERGIEGAVALRMSRDAVDALIDGKGVGLMVDLKPGLTEEMLRERIAREMAEMGPEEFFSELLRKLVPKALVIPLSEEVGAHSKNYIRKITPEQIEQLVKLLKGMVFPISDYAPFEYAVVTAGGVSCEDVNRYTMESLKVKGLYFAGEVLDLDANTGGYNLQIAFSTGRLAGMLKQMSKTGKGESNRAGLHAKIAESHPILCNATNKPGTKANLSAFCPSEMLSRRQLRIKAIKALYAHLKSDSDNMIASEKNMMNSIDKTYDLYFQMMTLPVELAHYAQQRQELAKQKKLPTYEDLHPNTRFIDNAVIRMIADSDTVNDRMAARKLGWSKYPELIRTLYNQLAATDYFQAYMSASESSFKADAALLATFFEKELQDCPMLDDVLEEQSILWSDDLGFVLTLVIRTISNMRQSHADVKMLPEFKSDEDAEFVKTLFEKTLINYNERLEYIEKFTRNWDVERIVFMDNLIMATAITELVSFPSIPVKVTLDEYIDIAKFYSTPGSSTFINGVLDKIVEALTEEGKLKKTGRGLIMMRHIFCILLVALVIGCQSRRTSSVQSGPTLEISDETLTEGTSDTIRFGRLHSGETGIKRFRLQNTSSRTWVVTRYEVSCECVTPEFDRRPLKPGEEIPFSVRFDSRGEHGWQMKLLKLYASGSEEPLRIYIEAVVDMLSSFRTGSLSFAKIAELPPVPAKIVKAEKKTGACSQFSEAYPIFCKDSQSRVSHQIIRTLAAGSARTGSSRSKLARTGDSFEYIGGSVFRLPPSDFPVNIVKICRSRSRSALLSCELTISMIETAEDQMEASCPEEKTRIKFGTSPVPARPDPKKRLNININRKLMINLLQATAPAPQAGGGYSLFIMLGLMILVLYFFMWRPESKRRKQMAQFRAGLKKGDKIITAGGIYGVVKEIKETTLLIEVDGNVTLRIDKNMVVADTSDLQQQQQKMAKKFTYKTQGTCSKSIEIELEGDIVKSVRFEGGCHGNTQGIGLLTRGMQAADVIARLEGIDCKGRGTSCPDQLAKALASGPRTITATTKPENGPVLQNPGKQRKNKSSYTVSRTAPGNGAADVCRSPGPIVVTGDMLPTPAEAKAETFSEKYDDPTARPTTSFESGNPMRKGCANKNKDDYILYYQAFETSDPTRLFAACAMHENKKAGFMIITMILIFVFGYLCIALEHKLRIDKAAIALLMCGALWTVLSLLGNDAQIGTQLIEQLGDTSEILFFLIGAMTIVELIDRHGGFHVITDHIKTRNKRKLLWLLSIITFFMSAVLDNMTTTIIMIMLLRRMISGQKERWIFASVIVIAANSSGAFSPIGDVTTIMLWMRGNVTSGLLVAKLFLPALVSVIIPTAIACRYIPDENAHPEKLDTAPKLPPFVGPRFSHFVLVLGVGGLLFVPIFKAVTGLPPYLGMLISLGVLWVFTELVYDHKQNMEESIKNRVSKVLKHIDMPTILFFLGILMSVAALQSAGLLTDFADFLDKNVHEVYTIAGITGLLSAVIDNVPLVAACMGMYPVADTAALASSLDPAYMQAFVQDGIFWHLLTFCAGVGGSLLIIGSAAGVVAMGLEKIEFGWYLRKITLLALAGYFAGMLVIFLEHLLLGMRNLVPEATEGKSKKGCPTSFLILLESRIRKSSRISSTNKKGLSETCMMEKGLSAQSKVTVDGGNVAATMGSGDLQVFATPAMVALMENAAMKAVADHLPEGSTTVGAEMNVTHIKPSGVGAEIVASAVLTEVEGRKLTFNVGARDAEGMIGEGVHVRYVVDREKFMSKVRMNIALDRRRLGKPGTSPVFARLSLSLAEDRIRFGNFREQVLTIALTFHYLMKKWFFLSLVLLLSLPGQASARHGQPGRWHTSFEIGPDGDTISVVPIKPVFVFSKKADLRRYRKLVEAVKKVYPVAQAAKAQMVQMEAELLRLETKKEQKQYIKGIAAAIKKEYTPVLKHMTRTQGRVLLKLIDRETKYTAYEILREFRGGFVAGFWQSVSRIFGQNLKSEYDREGDDKVLEQIVLYYEAGLLMKKLFIFSALITLALGGGVAATAKQMSFRTFMLSHTIGFETTQSWTASVRETSRAESWISINPTSGDAGKHTITVTLTENETTESRQAVVIISCGGESANISITQRGVGQDEPEDPDNPNNPDNPQKPEHPDVAPEDRLTWVETTYTEVYSDGSSTDKSYMLFEYDAEGLLTGYDQYDYDSEQTDKINASYERTLKRSEGKITDEEKWFEIDGSSYEGMPLPNSGEYTKEYRLNTSGLVSSYTDPDGASQTFTYNADGTLARLEYRNPSYPDENSTSTLTWQDGNIVSISTIDGRDNETTTFSYTEHLNPWNGIDIGAFMIGDAEESAMLLGISGTTVKNLPASCQDGNSTTTYTYTFDAEGRVSTIVTEVNWQDGGGSGSERTEYTLHYGPQTVSKPDYIPYLTKQEVVDEGTLPYTFSEDNPDEKWYGVNAYTSYAKIRSTMSDGRTSEKTEYRQININPSTQEGPVLGYLYITQDEADNFRLVSTSFNEIPLGENEITPHRFVYTLEYNCFTVNLEFDVFYPSCTVFDPATGEQKTHWMPMLPLDKNCFTVSEPELRYMGENTDENGPMSEYYYRQEYLFQVNRDVEPTEYDYQLLSRHMYVAHYMSGLKKPTATTAPQNEKCSSVGRHRFPAYDNEPKLCLKTMFENLTDKLERSFKLIKGEGRITEINVAETLKEIRRALIDADVNYKVAKSFTDEVKQKALGQDVLKSVKPGQMITKIVRDELAQLMGGTATDIKLEGTPAVILIAGLQGSGKTTFSGKLAAMLKSKKGRQVLLVAGDVYRPAAIDQLKVLGGQIGVEVYTEEGNKNPVQIAENAIKYARQHGFNVVIVDTAGRLAVDEAMMQEITAIKQAVKPGETLFVVDSMTGQDAVNTAREFNQRLDFDGVVLTKLDGDTRGGAAISIRAVVNKPLKFISSGEKMDAIQVFHPERMADRILGMGDVVSLVERAQEQYDEEEARRLKKKIVKNQFNFNDFMGQIAQIKKMGNLKDLASMIPGMGKALKNVEISDDVFKQTEAIINSMTPLEREKPEIIDAKRRERLAKGSGTTMAEVNKLMKQFEDTRKMMKAVAGGNMKIPKLPGRGFRRMQDKSEKASPVNTKNGFVRNTLQTSTRKIYRNRKKPERKTQREGPKKTRFFRPDLPIRPITGFFRKNSGVEKSRNLPRPPLSEKRHRPTPSEHRKMTLHLAGGIFFAIFVKDRRRFGNLSVQIRAIALGFHYFWSRQHGGPAMHKAGFVNIIGNPNVGKSTLMNALVGERLSIITSKAQTTRHRILGVVSGEDFQIVFSDTPGILKPSYKLQESMMKFVTGAVNDADVILYVTDTVEQSDRSNDILEKIRQSDIPTLAVINKIDLTTPEKLEELVDKWQALLPAATIVPVSARENFNIKGLFDLILERLPEGEAFYSKDTLTDKTLRFFASEIIREKILRNYDKEIPYCCEIAIEAYKEEPTIDRISAVIYVARDSQKGILIGHKGEKLKKVGQQAREDMEQFLGKKVFLQLYVKVNENWRDNERQLKRFGYEQEMALRKFILKIILLGTLLSNAATADAQYNKDYFYWASRRCLMNREYQEAIRVLNILLRADPDAAEGYFLRGVAKFNLDDLLGADTDFSAAIVKNPVFTTAYIYRALTRTRMGNYDDALQDFREAIDLRPDLPDAYYSRGYTRLQNKQYEEAIEDFDKFIFQENKVADAYIGRGTAYLYLKDTVRALENFDQAIRTNRENPNGYYQRGTLLLQKEEYARAEADFDMSIRCDSAFLPPYFNRAVVYSNTNRPMQALADFDRVLQLDSTNSFTYFNRAILRTQIGDYNRALDDFDRVALYSPGNVQVYYLRAMLKTRLGDLEGAERDYTRAIELYPDFANAYLNRSALRYALHNPKAAKRDEEIAQRKIAEYKSHLKDSTYSIYADTTQRMDKLLAFDNQFTNNYFDRISEQPSLGRSNMRLLPLFRFTLMQPDTTRIEASNRYTLQRVKDFEKKLDNPYLVLSNRPTNIGADSLAMLDSRYTEILSQNPRDWLLQVQYAISQSLIRQFTNSVGTYSSAIADNAANPFLYFNRAVTRAEMIDFISGLDNPYQRISIDSDPANKLTNPHTRTYNYDEAIADLDKTLRLFPNFAEAYYNRGTLLALSGKLPEAFEDFSRAIELNPLFAEAFYNRGMTQIYMKDTRKGCLDLSKAGELGITSAYEILKRYTREHTEAFMTQAIQKKLNDSAWARWTALILVALTMFFGYMFVDVLSPLQNMLESTRGWSPTIFGLYGGSEFILNVCGFLLVAGIILDKMGVRFTGILSASLMVLGAGIKFYGLSNYFYEGGFGYEFLNSFLTDIPASAKLACLGFMIFGCGTEMAGVTVSRAIVKWFTGKELALAMGLEMAIARLGVFAVFSLSPWVANWGGDPSVARPVAVVGLLLCIGLLTYIAFSVMDFKLDRQTEADTPIGETEEPFKVADLKNLFSSKTFLIVSALCVLYYSAIFPFQRFATGMLESNLGITNQQASDIFRWFPMGAMILTPLLGWFLDHKGKGATMLMIGAILMFICHMTFALVPLTPAIAFSAIILLGLSFSLVPAALWPSVPKLVDNRYMGSAYATIFWIQNLGLMAFPMIIGWVLNKVNPGVGEAIKAGEHVSYNYTVPMLIFASLGVLAFLLAFWLKLEDRKKHYGLELPNIKKMKISIVGPAHPYRGGLAVIMQSMARVFQHRGDEVKIKTFTLQYPRIFFPGRNQTVQTPPPPDLYIVRCVNTMNPFNWIAVGRWIAREKPDFVLMKYWTPFMAPCFGTIARFAKKNGTTRILCQIDNVEPHERHMTDKPFNRYFLRAVDGFIYMSEQVHRELRRYTQVPALFSPHPLFENFGIVIDRTEACIRLELDPSKRYALFFGLIRDYKGLDLLLDAWKIYKREHPAEDRRLIVAGEFYAPKEKYLKQIADNGLEDDVILHDYFIPDELVRYYFSVADFLVQPYRSATQSGVTQIAYQFDLPMVVTDVGGLPEIVPDGRVGFVCRPDAAEVARAIDRIWRDDVLAGFRANMEEEKKRFSWDAMCDRITELYRLVKMKFYIRIVLLAAFLTSLLSAHAQSPTITWDSTVKDLGDSNYEVVFTGKILPGWHTYDLHSDVSSTLVEFEPATGLTLDGDPYEINASKREYDDIFEVEMGTYFDEIILGQKVTLTGEGAVLKGNINWRSCEEENCNSPEDWGFEITIGDPEAAWASVAAGDAADQPVSGDGAGESKTLWGLIIEAVLWGFAALLTPCVFPMVPMTVSFFMKGSGSPAAGRFKASMYGFFIVALYTLPIAAIILITRLVGGDAVTADIFNWLATHWLPNLIFFIVFMIFAASFFGAFEITLPSWMVNKSDRHADKGGLIGIFFMALTLVLVSFSCTGPIVGNVLIRSTAGEFWVPIVTMFAFSLAFALPFTIFAFFPSLLKDLPKSGGWLGSVKVVLGFIEVALGFKFLSMADQTYHWGLLDREVYLAIWIVVFTLLGFYLLGKIRFAHDDELKHVSVTRLTLAIASLSFAVYMFPGMFGAPLKALSGYLPPMHTQDFVINTQGVVAAPSATAQTTEKIKYADILHWPYDLPGYFDLAQAEAAAREADKPLFVDITGISCVNCREMEARVWSDPRVQQILRDDYVLVALYTDDKTKVPENEWVTTAGGKVLKDIGRINSYIAQTRFGVNGQPNYLILGRDGQELVPKRAYNLDVEAYIDFLKSGVEAYNKTKMEKIKVANKYQKSIDLLNDALGKEIATSLQYMYFHVHFEDAGYEYLSKKMRMISIAEMRHSEELSDRILFLQGDVNMNPSFPTRQITDPKEMFRFAMQLEQSTIDSYNDAARIAAEADDSVTHKMFQDLAVEEEEHLDYFRNELQNLLDYGDKEYLALQSFARSKAEAEGKVSEMAEKTGYTYYADPQQVDFTLRMTVPALANEVLNTAGVDAQRKGFGIDKLNKENRSWVLSRMAIEIDDRPEQYTSYEIVTWVNEYNRMLSTRNFTLHDAAGREFGRAVTQWCIIDLAVRKAIDLNTVIGPCTDTLVDAPSPTEKPRKVMGITPQHVMEHRVVYSDIDFNRHVNTMRYINMMFDMLPIEQLTAIRPVRLDIHFMHECRYGQTLTVGYEQRDGLSLFEVSNGEEAAVRAALEWRMRFSISNATKRQSAGYPPGREKAVDTEWFHSYKNAPARLPADSSGVCRKQSEAFRPRRLHFVQRYEMAPQRFFLFFVHFRFAEYVMEVFDLFLTSGEAKIVKNFCKTNNFYRFSIKTQMDKKQKKSLRRHLLVIYIFYFLALAAGFIHSFVPHVSSSLATGWQAASEDIRMQEKHGIAQHTYFLAARLQNAQSDETLFPIETGHASISTEAEYTGVNIYVKTDGNSDPTVVRTLNRINYILLLSIPALLAKLSILILVALIINILRKSVRDEQPLPGRIIIYTRAVGFLLILAEVCTGVGSYIYQSTTRTFLEDSPLQVAASFPLNYWNIVMAILVLFSAEVFSIGSRLSEEQKLTIMAIIINIDVMMAKRKMSLGELAERVDITPANLSILKNGKAKAIRFSTLEAICRELNCQPGDIIEYRPEETTEMKRFILLLVTLFAMTNVMAQLQPDMPIPADKEVRVGRLENGMTYYIRHNEKPKGQASFYIFHHVGAVQEEDSQQGLAHFLEHMAFNGTKNLPGKKMIEYLERNGVKFGADLNAYTSYDETCYNLDNVPTANPATIDTALLILHDWSQFISLEPQEINNERGVIMEELRTRDGAGWRAMVRRNAAVNRGSKYEHRNVIGYLDGLKSFDHKALYDFYKTWYRPEYQAIVIVGDIDVDRIENKIKTLMADIPVSPADAPQKEAYLVPENEEPIVSIFSDPEMTASVMQLFIKRPALPKQYNNLIISQMYDVLNSYTSAMANDRMNEIAMQPDAPFLSAGMDSGNILGVNPTQDLTMVAVQTRDGELLCGYKAILEEMEKMKRYGFTQSEFDRTKAEFLRQAEATYANRNDLTNGQYVQTYLANYKKNTAMADAETQYNLDKQYLEALTLDDVNAWVKQLLTPENQVITVEVPKKEGLTEPTEAELLAIRSEVMASDVEAYQDNTVSEPLIPADIKLKGSPVKKTAYNEDLGTTEWILKNGVKIIVKPTQLKADEVLLQVQADGGMSQLADTEVKEGEFLPVIAAQSGVGKFSAIELNKQLAGKKAGINLYVNNYSNGMSGYCSPKDIETMLQLLYQNFTSPRFSEEDFNTTMDSYKAYVQNLTSNPDYIMQIETIKTLYSDNPRQQPLTIEALESISFENLPKTFKTLYPGANSFTFTFVGNVDLETLKPLVEKYIGSIPTSKHVLKFTDDKLRTAKGKVVNDFRTPMLQPKVSEFLLFSSDADYTLRNKQTMLLLNMALNNRYLKSIREEKGGTYGVQVSYTLSYRPEKQALLQIQFDTNEEMADELVPIVFDEIEKIATEGPEAKDINDSREYLVKQFKNTLENNGTWFGLIDDYNRHKQNLLADYEKTLNSITYDEIRDLAKKLLDSGNVIQVTMRPEAQPETDEMQQKNDPNNVLLFSDIRQPAPRQAGKTVTGQDHALRLPRTALPMKNMNRIATIFLAVTASLFFVGCYNDFDTPAPAKVWTDADFSDSKIISIKELKDIFEEAYPGTSGIGQSLTITDDLVIRGKVISSDQAGNVYKSMYLYDESCQSAIEIKVTSGYYITYAPGRLVYIRLQGLVLGNYRTMLSVGVASTNSDYANGNMEDRNTLEEHVKLGELIGLTAADTLVVTPASYSTLTDESLGRLIRFEGLESKFGKAGWGYKNTFPNYFANSTSYDVNSPGWTDINDWATWATKRVDELTHESTFYYGSAWFTYGDINTLAGNYVVRSSGYCRFRDEKIPADGSVVNITAIYTKFSQGSDATAAYQLLLNKASDVVVTSKMKIKSLLIFVFTLMSLTAFAQSGGIKGKVVSREGRVAVDGVKVSVTPGEMTATTDGRGGFVIENVEPGEYTLQFEAPEFEPLTLVVRVDKMVRDINTVILVPEVLSTVMDDSIFAEFDTESGNDAQSLPSSLSASKDVFNNIASFRFSEMRFNVRGYDSQYSDVYLNGIRFNDAMTGYTPWSLWSGLNDATRNQEITNGSIMSDYGVGSIGGTTNINARASQVRQGLRVSLVNANSMYRFRAMVTYGSGLLDNGWSYALSVSTRQGGNSYVDGVYYNSYGYFASAEKIFNSRHRLGFTIMGAPTERGAQQASTQEAYDLVGNNYYNPNWGYQDGKMRNARVRNSHEPIAMINYTFDPNEHTQFNLATSFRFGKNGYSALTWYDGADPRPDYYRYMPSYKLLNATDLEAASMAAASLADQWMRNVGNIRHFDWDEMYQTNMNFRNAEDEAIYGPGARSNYIIEERHTDQLDWNLAAQISRIYKDNSRLTAGANVRINRTWYYDEVKDLLGGDYYVDVDKFAQRDFGDPIMAQNDMDYYNQYGHARAVREGDKFSYNYKAHLRSGGVWATYATRFGGFGMKLGAELGGLSMWREGLWRKGLFPDNSKGKSEKLEYFVYKAKGNFDYVINANHTFELNAVAMQNAPAFQSAFVSPRTRNSVTPGLTTEKVYGIDASYNLRYGDYKLRVSGYYTKVNDRSKVISFYDDVLKTYTNFALSGIDEQYFGLEVAASIPIYNGLSLNGAISWGQYTYTSNPNYVQIADNSAEPLNSGTVYWKDMRVESTPQTAMNIGLSYRGPHNIYASIDLNYYNNMYLSMNPLYRTDEVLLPTMTDEQIRELRSQEKFDSAYTLSASIGKNFYIQRRYTLGFSLQVNNILNNQNIKTGGYEQMRVQGIKTGKEITSYQKFAPKYFYLFGTTYYLNVYFRFMKKRLIFTGLLALLFAACCFAQKPYKVVFYNLENFFDTINDPEVNDDEFTPEGPKKWNSVKYAKKLGNTEKVLFDIAGIDKDYPIVIGVSEVENRSVLEDIIATPKMAPGNYRISHYDSPEARGVDVAFMYRPDVFKLEGSAPIRTQIPSLPNFKTRDISTMWGTIDGEPFFFMVAHWPSRLGGKDASEFKRIAVGEQMRRIADSVLKVNPATKIVAMGDFNDDPTDPSMLEGLNAKPKVKDLQPGDFFSPFHAVLRAGMGTLAYGDAWNLFDNIVVSENLVNAKPGELRLVRAPGSKYYGNVFKRNYMIQREGQFKGYPLRTYVGNNFQGGYSDHFPVYIYIGKMFRYCEKGWKWLFLTMIALSVVACGDDTDDFWGSAVWRTSSTVGAAEGSAAIQIEGPVGAGWRAEIKDGGAWCSFRLNDPTVLVKEGTVQSSNISNILDVYYTRNTGSGERSATIEFEFFGGEPQVLVLTQFSASSTNDPYDEGHAKAWAELPEKRVDENFVYVSHFASLNNRTVRNYSFCYDKTLHVAHWVAYPLHSVYRGSIDRTDDFQYDPKVDYSWQPNLAAGSYRGSYDRGHQLPSADRTATRELNLQTFYATNMTPQLNRLNQDMWANLEAKVRAQICNDTLYVVTGCYYANTNTTTTDRDGKVCPVPTNYFKVLLRTRTGTTGKRIADCSADELKAIGFWVDQKSYGDIQPPASICMSVAEIEKKTGFTFFPNIPESAAESVKAQNSPSQWGIQNMKKSSIWKLLFSALTVFAVAVFAGCTDDNDDMGAPYLNVTPENLTFDAEGQPADEYNGTFIVETNRPWRAIVEDEQTWVRLSATEGEGDAAVTVTVPASNIGQSAKVTFEVYNSYGALIQKDVNVLQGEVVPPTLIFNETAGSESVANPYPLVADYTGWNTTGEGASKVSYEGVNTSIRASGKSSAGAYDGASGPNVIFFGSAPATFTVKNITLASGQTNLKLTFGGQYYDGDNNDNNFNKDNFVVYLSANGTDYTPLSYEVNDGDQVDPYWVFATKNFTLKNATSTLYIKFEAKASSKFRLDDITLMTGNGGEEIDLAGGGVVPPDPSGDAIYENNFDKTPAEKVDNKWPFLDQTDAWQNASGTGNSTVTYTSANVSVRTSGKLSGGYDGASGSNKIFFGSAPATFDINTITMPAGKTNYRIIFGGAYSQSNGGTYDNIFKPESFHVAVGNGTDWSGNLTYEKIGGSDTTDPYWVQFAVDFTLKEAVGQLSIRFTADLASVFAIDDVQLVEGNGGQEVDLEGGVVPPDPGEATAITIPELIAQMTDTEAPVDANADRYLDAVVMNDVAGANYTFNNLILATENATEAGNGITLYGSQVEPSTLGLNKGDKVRVTLYKGLAKVVNYSGMYEVTGAKEATWCKVEKTGTVTSIPTATIAAADLAKYQGMAVTIANASVAQAGVWASASALSSHTFTADGANFTVFCKQSDEKNPSVFLDVPFKAGSGNISGLAAVYKNNSQLVPRNLDDVAAFSDSSTPMITGVTPASLSFEAAGGEKTLTVSVINQGNNQLSVSGLTAPLSATVSGLTVTVKADPNTGTQPVNQMLTITLANGNSKEVPVTLLGVGGGEGGTYTLIDNLSNLSAGTYLMAGFRAKGEAQSGSATEPNPAAEDYYGVWTGEMITGNGKTDCETLQMTFANGELTKIDANVTNSPAEMELVAVDGKSNTYYIKCNGQYLASGSKSRSLSLGADPAEWVFSMVDKDGESRLVAANGGCSLQTVDSSFKTMIRGYASATQGKHGIYFFKKNMIQRIQTLYLLLVVVLTGLALWLPLADFTVGADTCTLTAFGLKDAAGITLLPTVYLGVVLVAACLVPLVTIFLFKRRLVQIRLCAVELVLLIGAGAMMGIYFYLCNRYFADSEFYSHTLKISLVFPLVCLVFDLLALRAIFRDEKLVRSLDRIRMDATLDISVVVPLYNEEESLPELVEWIDRVARGEGLSYEVILVDDGSGDGSWRVIESLHERFAAVRGIKFARNYGKSAALYCGFAEARGEVVFTMDADLQDSPDEIPALRHMVLDEGYDLVSGWKKKRHDPAGKRWPSKFFNWTARIVSGIRLHDFNCGLKAYRRRVVKAIEVYGEMHRYIPILAKQAGFKRIGEKVVEHRARKYGHSKFGMERMVKGYLDLITVSFLSRFGRSPMYFFGSLGTLMFLFGGCTTAWVIGAKLYKQCHDLPVRAVTDQPLFYLSLLAVVLGVQLFLAGFLGELIDRNAADRNKYLIEKTLDNQMTKFKFWNEVCKYGAIIGLVMSVAFVIEQSLMLSGWFSTMGLVWILAAVVYIALLYRFAKRRREQYGHEQGFPLSRGLGFILALILSSALIKGVVEYLYRSVFIGYSEYIDRYTSALIRFAEDGKLPASMEGVFAEMLKTIQEAPEPSILATVWASIWGNLIVGLVLGLILAGILARAPRPFGPQSEEMLVKIYTENPSEKEIDRVVNLLERDGVVIYPTDSVYAFGCSIRSAKAVERLRRIKGKDLTTFSVVFDSLGQIADYCRVDNAQFRLLKQNLPGPFTFLLDASSRMPHKALERRRTIGIRIPDNSIPRAIVERLGAPLLTSSVLDDEETEYMTDPELIHERYGRDVELVIDGGVGDAVPTTVVDLTGGEPEILREGKGILREMKRMTAKKRLLVVFIAAVAVGATVALVFIFQFFGDAVRERSDLYISARTDYPGLLDSLRPRTDHHWAFDRYAGRLELERSFKPGHYVLEPGMNVVEIARMLKLGMQTPVRVTLNYARTRAFLASRLARQLDADSAELMRALTDPQLAREVGTDSLQLFSLFIPNTYEFYWTVSPEDFVRRMRKEYDRFWTPERDAARRRSGLSRDEVMTLASIVTEETNKADEMPRVAGVYINRLRKGMPLQADPTVKYALQDFSLRRILHKHLRTPSPYNTYLNKGLPPSPIAMPSVAAIDGVLNFENHDYLFFCARPTFDGYHSFARTYGEHLANARAYSAELNRRNIKMIFSKSDICSAEYYSYYNICPAEVSLLDSMLKRKEYSNTGKYVFPGIAYDCSLNWYRRFLKSAGNGRVHKKRVSYLYRTATTTYPCLIPHLGESVGAGRIRLTPAQKYEFFVSLQRKKELSAILSLFFESRMPKRLPGCVSEGGAGRVNEMNSYGTKFRLSIFGESHGPLIGVVLDGVPAGMPLSREDFLADLDRRRSGAKGSTPRKESDLPEIVSGVCDGHTTGAPLTIVFRNSNTRSGDYSDFRATPRPGHADFVAERKYRAFNDLRGGGHFSGRLTLTLVAAGVVAKKMIGPIEIRARITELGGIPRERLNCEPGKELGAEGAPTLWDELIDRTLRELDSVGGVIECTCDKVPVGLGEPFFDSLESQLAHLAFSIPAVRGIEFGDGFAAARMKGSEHNDCFVNGEGKTATNGAGGINGGISNGNPVVFRIAVKPTSSIAKKQYTFNFATGRMEEFVVKGRHDACIALRCPVVVEAIAAIALANNMAELRADLCRLSVEEVERLVEIRPNLIATCRIANSSEAFAREQLEAAIRRGARYVDIEIEAPDEHLEYIRTLAREYGCRLIVSFHDFEGTPSLDELKGIARLCRTKGADLVKIVTTARNISDAARTMRLYDLQADGALFEGAAAAERPQLVAFSMGEAGKFTRLLCLKLGAPYTYVSAGASNATASGQYTREEMERLLSAENYPFEGFREFRRTTVAVPCSKSVAQRAVLAAALAAGESRLANYAPCNDIVGAVEVIRGMGCRIASDGTTLHIEGVGAERLGRCTKIETGESGLLTRLLTPLASHISALNGGAPVEISGHGSILKRNLHEAVAALREAGVHCSAREEGYLPFRIEGGITRREIAFSGRESSQTVSGFLMTLPLLQDATVLTVTEPSSIPYLELTLRTLTRFGIRLDREAFYDGGCGGRKPGTPSKIVFSVPGGQEYRPSDLFLDADWSSAAYFAVAGAVASSLGRTEGITLRNMRLDSLQADEKILDILRSCGADVSVAPADASARGDMPGDLQNISVTATGRRLKAFEVDATHCPDLFPILAVLAAHCDGTSRIAGVGRLTQKESNRAETIYAEFRTLGARIDIRGDEMFVTGGPLHGGDVRSHNDHRIAMSLIVAGLFTPEPVRLDDVKCIDKSFPSFLDLLARQEMSNLHISSDFSGLDALIPQGRRVFVVIDSNLKPFFGLFERYELIPIQTSEKVKTFATVEYIIEQLLERGADRSSFLVGVGGGITTDLCGFAASVYKRGIRFGFVPTTLLAQVDASIGGKNGVNFHAYKNMVGTITQPEWIYICTDALRTLSPREFRAGIAEVLKTFILFDAEYYRKAVDYFARMEAHLRKAGTCCGGECVYGQEELTEIIRKTALYKCAVVERDAFEKGERRLLNLGHTFAHAIEKNCPIMHGEAVAIGLVLAAGVSERLGLAPAGLAVGLAEDLKKVGLPTQSPIAIGVLLEALEKDKKVEGDAIHFILPRAVGEVVDRAIPLKQLEEVARDLRMSFSEKCDTFVPLNTLDGYSTTKTICNTFSLHTPIIITFIRAEMKKQQPAELGGSEETKPAKPTVTPARRVENVEEYYFSVKLKEVARMNESGTRVINLGIGSPDLPPSAETVQVLCQAAARPDTHGYQPYVGIPELRAEFARWYKRWYGVDLAPANEILPLIGSKEGVMHISLAFLNEGDGVLIPNPGYPTYASVSKLTGARILPYALKEENDWQPDFEALEKMDLSGVKLMWCNYPNMPTGANGSRELFEKLVAFGRRHNIVICHDNPYSFILNDRPLSILSVPGAKEICIELNSMSKTFNMPGWRIGMVATNSRFLEWILRVKSNMDSGMFRPMQLAAVEALKAPDSWYQRMNEVYRRRRALAARILETLGCDVRDDQVGMFLWGRVNDTLAAQLTAAGECPNGVGEAICNRVLYQSRVFVTPGFIFGSEGRNYIRISLCCNEEMLQEALDRITTTRTKQNQMKMEIEPLTFPGVDPKRPMIIAGPCSAESREQVLKTASELAARGVKIFRAGIWKPRTKPGGFEGIGVEGLPWMKQVKQETGMLVATEVATPAHVFEALKAGIDILWVGARTVTNPFAMQELADALKGVDIPILVKNPVNPDLELWVGAIERLYNAGLRRLGVIHRGFSSYEKKIYRNAPLWHIPIELRRRYPNLTIFCDPSHIGGKRELVAPISQQALDLNFDGLIIESHCDPDSALSDAAQQVTPEVLDYTLQLLVVRDNAQTTENISILRRQIDEVDEQLLSLLAKRMHISQEIGTYKKEHNMPILQNKRYDEILDKRGKMGQSLDLDPEFISEIMKAIHEESVKVQMEIMKMRILILGAGKMGSFFTDLLSFNHDVAVLEKDPRRMRFIYNAQRFTSPEEIADFRPELLINCVTLNATLQAFEEVFPYLPKECIISDIASVKTGLQEFYEKSGFRYVSTHPMFGPTFANLGNLQTENAIIIKESDHMGKIFFKDLYGSLKLNVCEYTFEGHDEVVAYSLSVPFASTLVFASIMKHQDAPGTTFKKHMAIARGLLSEDDYLLTEILFNPKTPAQIDNIVATLTHLSKIIDKKDSGKMKRFLDGVRKNLEMKRSAILSLMFIAGMLAVPGVLNAQVEKRVEVSKAYVPSVEHATKLAVRPNMVDTAAIQPEIDYSITPLTLETQLATRPIRPATITYWEFDRPLPFYLKAGAGYPLNSALDLYVSTQNPDIGYALGYINHDGRYGRIPYTPDGDHSALWMDNRVGVAAGKYIGRHVLEGEVSYRNRIIDRYGLFPDPDFPTFDNGNRRVIGDLQGKIRIGDDFNDLSRTNFNVEVTAGNWWNPLDSKLYLEDNVVPVLDYPYENEWNLGVDAAVGRRFGRHTLVFRAGFEGRWGGDRKGESVWAAPSDYYNRTYSGAFRYAYRARSVDMEFGLDYYRDDVAGRDAANYFIPYAHLRFDLGGGGFVPYVELDGTLKHNDMRELMETNLYYVPRYTDLMPRNTVDYSVRVGVSGRLVEDKLIYRLFVGYSFIENHNFWYCYTPTTRYEGFSLVQGRLNVMSLNGELEFRPVSNFTFSIGGRGLTYTEHQTLSIGLPEFEGTVRARYHHRKFSVGLVFDLQSNRYISRVIPWFPNDGIVGNMRIPYTVDLGLNVDWYASKRVTVFAEGHNLCNRRIYDWSTFPQYSAGFTAGVKLSFMKRNILYLLSIGICLFTCVGSHAAAPETRAHLERGRSLFDHGRWTDARYELLKAREGADRDDRLTLQQIDYQLAVCALKLGSRDAEAMLADFSKRYPESVYNNDLRFAQGLLYCSRSEYDKALACFGRVNYRALDRTRREQYDLRMGYIEFGRDDYDRAMTYFDRINPQSEFYDHALYYKSYIAYAREQYDWARSGFERLLKSEAYGEVAPYYLLQIEFKQGNYRYVVENGEELIRRASPRQRAELSRVMAEAWFRLGEYSKPLDYLDAFVQAGGEMGRDENYLYGFSLYRTARYDDAAEYLRKACGADDALTQNASYHLADCYLRGGDKQQAMQSFAMASNAEFDSAIAEDALFNYGKLQYELGGGRFNEAIQVLNRYVAQYPSSPRVRTAKELLAAAYYNSHNYDEAYEIIASYPDPDGDLLAAKQKIAYFRGLSALEKGDTQGAGRYLAESARIGISPKYNALATFWQGEIAYGRGNYDVALRDYESYLKRAPKTEPEYAMAFYNTGYCHFSKENMPRARESFVRFIELYPTQDGYRTDARNRLGDTYYSDRQFDEALKYYGQAAAASDDGADYARYQRAVTLGILGRTSEKIKALQQIIRDGRGDYLDDATYELGRTFVAQERYREGAAVLEHFVETYVYSPYRSAALSELGLAYLNLGDKKKSLSYYDMVVKTAPQSSDAKDALQGIRDIYVSEGDAGGYFDYARKSGVEGDLTAMSRDSLSFAAARRIYLSGEPASAAKSLRSYLESYPKGYYTADALYCLSDCYLKTGERSRAIETLAALAGAGQNQYTHRALKTLAGMTFADERFTEAAAAYRKLADAESTAAGKAEAMNGYVRATIAAGDEERILSMADDVASYTAAGDLAWRESQFAKAGILDRRGDAAAAQKIYKVLSANVKTSEGAESAYRVIESAFRAGDTARAEKLVLDFSDKGTPHAFWLAKSFLVLGDIYVQKGDMFQARATYQSIVDGYTPADDGIVAEAKEKIKKLNMNFLFFVFIRQNMRAVLPSFVEKILFSFLSGNNRSQMVRLPREIVIFTGNDSDLNECTGLGLNKFGAGPGFRYLCRRMIQQVTIQMTSARTYVLEGNKKCDQLNPKELMLLAGVTCAGMTAMAIMEKERVSPTRFELSISGELDTETVQSSSVFKSFRIVYNVQCECENDQMKVSRAINLAHDKHCGGVQMLRKIAPVADEIAIVNTKMLSQRARSLITGVCRLVLAVVFIVSGFTKVIDPWGTSIKINEYLTIYGFDYLIPASMVFSIWLCGAEMMMGCMLLCKVRIRLVSIFALVSMLFFTILTFLSATFIPVEDCGCFGEAIKLSPWETFFKNLALLPMAAVVWAYYRNDKILAFRRSEVALTIFFFLLTMGLGFYCYCHLPLIDFLPYKIGVNIREEMHASSAAGPEGELQTVLVYRNRMTGEEREFALDDTEWQDDTVWEWVDTKILGEVPEMNPMIEEFALRNGAEDVTDRVLATPGRLYLICVTRFDRIGRRCEDRLERLVERALQEGAHVVCITPEPLQGNGIHSFGKSTPVPCYNIDGSTLKTMLRAHTGIVVLDDGVIADKRNCRDIDMLIVLEGLDGAGKSTQVELVRRMFAQEGVESHFLHFPRFDAPVYGELIARFLRGELGAVDKVDPYLVALLFAGDRADAAAQLRCWLDAGHAVVLDRYVYSNVGFQCAKLPAGDRQEELRRWILDLEFGYYGIPRPDVSLFLDVPFAFTEKKLSEVREGDDRDYLKGERDIHEASLDLQRRVREVYRAAAAADDRLRIIDCSDARGGMDSPDAIFARIRTEIERFRMFDVEKVRRDFPILGVRVYDKPLVYLDSGATAQKPECVIETVDRLHRESNANIHRGVHFLSEEATEMYEAARARIAEYIGAEAREEVVFTAGATASLNTVAYAWCERFLRAGDNIVVSEMEHHSNIVPWQLVAERKGAEIRVLPFDEEGRLMTERLPALLDGRTRVVAVTQASNTLGTRPDLRPVIDEAHRVGAVVVVDGCQGVVHGGVDVKALDCDFYAFSGHKLYAPTGIGVLYGKRDLLDWMPPFLSGGDMVDRVSFEKTTFAPVPLKFEAGTANFVGAIALGEAVRYVRQFDAAEVEAHERALLLRATEGLERIPGLRIYGTTPDKCAIVSFNVEGVHPYDMGMILDKLGIAVRTGQHCAEPVMTHYGVTGMCRASFAMYNTLAEADALVAGVERAVKMLKMEWTDIFSGPAFEPVKSRELHLGKDCDLSRPLVVRDTDKLTVEVAGGAALRLVVLHTKPCQAEVRIKLLEGADAELVQLFSAEAFVDFQVEQAAGSKFRMTACQFTSANVRYRFDLNGREASNELDVLFLALEQDHCVVDLRTNHLVPDCTSRSLIKGVASGTGRGEFCGLVYVAPDAQHTDAQQQCRNILLSRTSRIDARPQLEIYADDVRCSHGATVGQMEDEAILYMRQRGLKEEQARRLQIEGFAADVVGRCRIEAVKEILTDAVVRHLDKIMLSVKNLRAQVAGKEILKGIDLEVKAGEVHAIMGPNGSGKSTLASVLAGNEKFTVTGGEATFLGQDLLSLPIEERACMGLFLGFQYPVEIPGVSMANFMKMAVNEQRKFRGEKPLAPAEFLKLVREKSAIVELDSKLISRSVNEGFSGGEKKKNEIFQMAMLEPKLAILDETDSGLDIDALRIVGTGVTKLHRSDNATIVITHYQRLLDYIVPDFVHVLYKGRIIYSGDRSLALKLEKEGYDWLINDYKEMAEKDKELIENIEKQEYKYGFTSDIETETIPRGLNEEVVRLISTKKGEPEWMTERRLKAYRHWLNMVSPSWAHLTIPPIDFQDVIYYAAPKPSKKLASMDEVDPELKRTFDKLGIPLEEQMALAGVAVDAVMDSVSVKTTFKETLAEKGIIFCSMSEAIRDYPELIQKYLGSVVPYTDNFYAALNAAVFSDGSFCYIPKGVRCPMELSTYFRINAAGTGQFERTLIVADEGAYVSYLEGCTAPRRDENQLHAAVVEIVVEKDAEVKYSTVQNWYPGDKEGKGGVYNFVTKRGICRENARLSWTQVETGSAITWKYPSCILAGDNSVGEFYSVAMTNHFQQADTGTKMIHVGRNTRSRIVSKGISAGRSENSYRGLVRVAKAAENARNYSQCDSLLIGDKCGAHTFPVIESGNPTAVVEHEATTSKISEEQLFYCNQRGLTTEDAVGLIVNGYAREVLNKLPMEFAVEAQKLLAISLEGSVGMRNNYAKLQKKCKSFPPDRFFSPAESPRASKAVKIYIFVPTMQSGIKLISRIYLKLVLLQVAVGTLLRIVLLFNEQTSDISFTFGQWLKIFLLGAVNDWCALTIGFAVLWLFALSIAPGKYARPLGYILFGILSVAWIYVTFFNTIFDEYGSVVPLIASILFGFWAVSFGLRLFLPQIRPGWRRTWLAVLTGLYTGGIILNAVSEWFFWSEFGVRYNFIAVDYLVYTNEVVGNIMESYPVVPLFAGVLLLTVGCTWLLFRREIRRAGEFGTWQWKAAVSPAYLLLTLGCCLLLQFNTRFQQSANTYANELQATGAYKFYDAFMKNELSYPQFYLTLPQKEAEANVHAIYGSTGDNLRHIPGNPDTLRRNIVLITIESMSASFMQHFGYPDAITPHLDSLYKMGIAFEQCFATGNRTVRGLEAVTLSLPPCPGQSIIKRPRNDNMHSTAAVLREKGYDAYYFYGGNSYFDNMETFFGGNGYRIIDQKSYKPEEITFANIWGVCDEDAYDKVIRSLGERADTTAAPFFAHVMTVSNHRPYTYPAGRIPIPNDAKLRSGGVMYTDYALGRFFEEASRQPWFDNTVFVITADHCASSAGKTEIPLEKYHIPALIFAPGLITPQQVDKVISQIDLMPTLFSLLGMDYDSHFFGQDALSDDFRERAFVATYQDLGYLEGDVFTVLSPVNRAEQYRISPTEEDRYNLVLEEGIPSQELLDRAISLYQTSSAWNTRPMSDKNGEECWYALKVFYNRVFELEKQLAQEGVRSYIPLLREEIATGSKIVRKRKPAVSSLMFIRQSEHYLLELQNRLKASCPFMAYFDRETKKPAAIPDREMELFMQITSADTPDLEYFSDEAIDYRSGDKVRVTGGPFKGAEGYIKRIRGNRRLIVALEGVIAVATTYIPGRFLEKMPENMYRLIEKLHLERYLNSRLILAIDLVVSGVASLCALVLVRLLLPPLSNISKFALLWIGCAVVYSFITFFLLKTYRSVIRHSTLREIAKFVVAVIGKELLLGLTILLYPPTPLFGMHMLALLLFDLLLTLCGLILIRVAMIIVYDLVKNNLKSRMLVYGLSEKSVSLVTRLQSSPHYKVVGFLTFGRRMKNHTIAECPVYYFENEYSIRYLRQRYDIDAVLFPTNEEAQAEQERLIRYCVESNLKILIAPPIDEVIDGKIMRQSIREIKIEDLLGRPEIKISLDEIIANFREKTVMVTGAAGSIGSELCRQLASFGIEKLILFDNAETPMHNLRLELEERFPKLEFVPVIGDIRLPNRLDFAFRTFHPQVVFHAAAYKHVPLMEENPCEAVLVNVIGTRNVALKCLEYNVEKMVMISTDKAVNPTNIMGCTKRLAEIYVQSLGLAIEQGTIEGATKFVTTRFGNVLGSNGSVIPRFREQIAKGGPVTVTHPDITRFFMTIPEACQLVMEAATISTGNQICVFDMGKSVKIADLAKRMIELAGYEPGEEIKIEYTGLRPGEKLYEEVLSNTENTIPTTHDRIRIAKVREYDYAEACAATEQLEQFARMVNVPDTVCLMKKIVPEFKSKNSEFEQFDKVQPAMKGIVLAGGSGTRLYPITKGVSKQLLPIYDKPMVYYPISVLMLAGIRDILIISTPADLPAFRRLLGDGSDYGVRFEYAEQPSPDGLAQAFLIGEKFIGSDSACLVLGDNIFHGSGFSTMLREAVRTAEEENKATVFGYWVDDPERYGVAEFDGNGNCLSIEEKPANPKSNYAVVGLYFYPNKVVDVAKKIKPSARGELEITTVNQVFLQDSQLKVQTLGRGFAWLDTGTHDSLAQASIFVEVIEKRQGLKIACLEGIAYRMGWISEEKMRALAQPMIKNQYGQYLLKVIDELKREQKMKVIATAIKDVVIIEPQVFGDDRGYFFESYSQQQFDQAVRPVHFVQDNESKSRRGVLRGLHFQKGAAAQSKLVRVVQGRVLDVAVDIRRGSPTFGKHVAVELTAENHRQLFVPRGFAHGFSVLSDEAVFQYKCDNFYAPQSEGAIAWNDPDLGIDWQLPAEEAILSPKDRAHPRLKDADELFDYGIDYYAMHNILVTGADGQLGREMRTLGAASRHRYFFTDVADLDITDANAVRRFVENERIDAIVNCAAYTNVDKAEEEAETADRINHEAVRNLAEAAKACGATLFHISTDYVFGGMGNIPFREEDPTAPLGVYGKTKLAGEEAIVASGCKHLVFRTAWLYSPYGRNFLKTMLQLTADKPELQVVFDQVGTPTCAADLARVIFDRIESGDYAGREGFYHFSNEGVCSWYDFAHEIAALAGHTSCKIRPCHSAEFPSKVQRPNYSVLDKTKIKTTFGIDIPHWRDSLVRCMATLRMKRNILITGGAGFIGSHVVRLFVNKYPDYRIVNLDKLTYAGNLANLRDIENAPNYTFVKADICDYDTIREVFCKYDIDGVIHLAAESHVDRSIKDPFIFARTNVMGTLSLLQAAKEQWNGNWEGKRFYHISTDEVYGALQFDGTLFTEETRYDPHSPYSAAKASSDHFVRAYHDTYGLPTIVTNCSNNYGPYQFPEKLIPLFINNIRHGRPLPVYGKGENVRDWLYVEDHARAIDLIFHKGRIAETYNIGGFNEWKNIDLIKVIVRTVDRLLGNPEGESEKLITYVTDRAGHDLRYAIDSRKLKNELGWEPSLQFEEGIEKTVRWYLENQEWMDHITSGEYEKYYESMYKNRMNIAIVGTGYVGLVSGACFAEMGIDVTCVDINPEKIKCLLNGEIPIYEPGLDDLVKRNVEAGRLHFTTDLTTCLDNVEVVFSAVGTPPDEDGSADLQYVLEVARTFGRNIKKYTILVTKSTVPVGTAKKVKAVIEEELTKRGEQIDFEVASNPEFLKEGAAIKDFMSPDRVVVGIESDRAKKVMERLYRPFQMNNYRLYFMDIPSAEMTKYAANAMLATRISFMNDIANLCDLVGANVDMVRKGIGADTRIGSKFLYPGCGYGGSCFPKDVKALARTAREYGYTMGVIEAVEAVNERQKEIVVKKLQDKLGTLRGKTIALWGLAFKPETDDMREAPALVVIEKLLEAGASVKVYDPVAMDECRRRIGDRVVYCKDMYDVVIDADALAVLTEWKEFRIPSWSVIKRVMKQSVLVDGRNIYSKDEVIAEGFEYAAIGKMVFEFFTGLTIFGFRLYVQKSTFYILRYRRPKFRKNGLMKILVTGSAGFIGYHLSKRLLEAGNQVVGIDSINDYYDVRLKYARLETAGIHRNLVAKGQPVQSDRYPAYRFIQMHLEDRQALQNLFGTEKFDAVVNLAAQAGVRYSIENPYAYIDSNIVGFLNLLECVRHNPVRHFVYASSSSVYGGNTKTPFSEEDRVDNPVSLYAATKKSNELMAHVYSGLYGIPTTGLRFFTVYGPWGRPDMAPMLFAGAIREGRPIKVFNHGNLSRDFTYIDDIIEGMVRVIGKAPAPTQDRPIPAEVYNIGCGHPVQLMDFIHTLEQALGKNAQLQMMPMQQGDVYTTYADTTKLERDFGYRPQVSLAEGIAIFAQWYEKQQTTGNNDMINSRKDLENYIRADRQRNIGSIGFLKYRLGLFMKSESCIAFHYLTALRHCEYYHNTRANLWHRLLACYWKIRLSRRGGKYQIAIGLNMVGPGLRIPHSRGGEMGCNCQINSGVVIGLNKTPDNRPIIGNNVLLSPGVKITGKCKIGDNVAIQPNSVVFRDIPDNCICSGIPAQIIKRRSDSSQSVPMKFTKQTKQVVILYASTLSGVLLGVVASIINTRFLSPADYGDVRYVQNIINFIASLLLFGYFLSGSRLLALSNNELRSRTIRGTMLLILIMACVVLSLSMLVCYFAHSPANPAIAQLFLISIPVCYYPLLLNYINTVSQGDNHIGRLSIARLLPTLLYILTAVFVYQQWGADSESVISIQWGIYSAVLLIIILSAHPKISNVKHIFTELNDENHKYGLQLYIGSLFMVASNYLAGITLGVFNEDNTEVGFYTLALTVTTPLSTLPAIIGTTYFKQFATQPRIPSKVLKNSILLTVGTCILFILLIKPLIAFLYSEEYHSVGNYAVWLAAGFSIHGFGDMINRYLGSHGQGKAIRNSSIANGVFKIFGYTTFVYLFNTEGALLTNVLCSIIYCTTLIYYYQKFISVQNGMILGSDWDLYKFSYSDLYQFNNVQYIPGPYPPINSLKGLLYRIHFNPTINRLVKLPFKTAWNDSYFKHRFPVSKPFCFIVFMNWIKQDVGITTYLREKFPNAKLVCILQDLASTHPFYCNNLKKQFDLVLSFDPGDCATYGFIYHPLVYSSYHGKIKKMPYSDVYMLAKAKNRLNDIFKIYTILKDNNLKPNLLLAGVDIQDQKYKDEITYLNRDSHLIPSIMNKLNVLNVSDANKFAFIKGNRPTDEKAIKVKKDSISEHGILCPITAVNGEEVIKSNGHLTDLDGNDIADEHAKDYYAVLDGQHRLKAYLELGLPLEDLVVIEPLNKKIAIALLIAEMNICTKTWKGSDYMAAPAMAIKETNAAFDFAMELQRRNFPLSTISLWACGNNKLKAKDLVASLKTREMPQCLQEADGWCAKSRKWFEAASEKFTAKFLAKKYLISFIQDGYNVAEDAAAYTLEIEEKLKKLAQWQADKIQNARKTSTQTQEQVILDLLREHLMEKSKRVVGYARVSTEAQDITRQIELITAYCSDRNYHLIKIIQEKISGARKDRKSLNELLDVDDAVADMIIVSELSRLSREDDILSVLSTINELLKQGVDILFLDKQDRIYKAGTILSLYDIITLSVEAKASADERYKIAGRMQTGLRSKLAEFSNMFAGGTVPFGYKVIHNPDYKLNQTPKNLLVVDAKEAEAVKYLFQQLIDGNTIRQTVRVYNKLYPYKLSYSGICRIIRNPKYKGEIYRRGKLYGQIPELQIITPEDFDKANKQMRENSLFQSNAPKYYNPLKGLLFCPCGCGLYMKPNHNSYLIYRCSSAYNDKQKCENYGVKCAYILSSVWTCVKETLHTEEYKRFNTQRANELQGINKQIRETITRKVNSVDELKTQSASLIAKIKKLNNDDLINELETDYNVLCKQIKQTEQEISELNGQIAENDAEIKRNVEQKDFSKMEQSALYKEKLQKAVYHSLSAMRGILEIVFKNGMTRYVLIKKHRNGGTYLLPDTFKGDMERKQIIVPSLRTDKDNPYSAQPMNLRYTFDEFFKAMPVEEYEIPITEMSNKVFTPENISKLKQNEVFVFGSNKAGNHVGGAARVAVEKFGAIMGHGEGLQGQSYAIPTLDEQMDKVSTEELTRSVRRFADYTRYNTDKVFYVTKIGCGIAGFSVEEIVEVFKSVSFGDNVVLPQEFGEEKHIDGFKGFNADMTCLGFKFEEGKTYEEDVELKVCNRGFHFCESPFSVLSYRDMLDDECKFIPVHHVTALGRCHSDSDKTATTKIHIGAKLDFKGFIKAGIDFIYEKCIKEGPTDNVNSGDDAQIGSSGYGAQIGSSGYLAKIGSSGYLAKIGSSGDHAQIGSSGYGAKIGSSGDDAKIGSSGDLAQIGSSGDDAMMQDKTIQDTYSDMTAANIAAYIGNLEEENRKLRKKLQEKEDNSIDVNVFKNVVMTVEETARFHGVSAARVRDYAKRGLIETHPDSTDAKMLFYAKTILTLDFPTLKKKKALLKWEMMETKKSNQTFGEIWHSLAPSEQSRRANEIMERLGVSMWTIQSWITDPEKGGYRRPSKRRQAILAEMFQVPVEGLFLAKTYSPENMKAVYNKSKIMLNAWYMFRVKMVKNFAEALRKAWNNEKLANIRAMIEGRTPEEASVPEAAGEHSAAAKIAFAAGCLDYYADARPGQYFGDMNDFQRIENVLSHLKKSARALSIELGLKNPQVFYDIKAGKCGISKDLALKLQDKYFINAAWLLTGDGEMLRESHSTSPVGNAATSADKSEMQQTQGSPAPTTENITNLIAITREAMAVIREQSAQMNRLITQVELSNARYDRLFASISGVSTGFPATPTDLGVKNPPPIKSELKMYINELQKYIVIQTPDNKHSKKMIIGYLRVSTGKQHLANQQDEIRRFAESRNLVVDHWVTEVVSGKKSERDRKLGALLRRLKKNDTLIVTEISRLSRTLTDIMAIMGKCLERGINLYTTKEGYSFDNTINSKVLCFAFGLVAEIERNLISMRTREALALRRAEGMVLGRRYGSYTKLNVLIENRQTVIAMLDRGKSIGDICRHFGLSRDTFAKFRVKYPSVQKALDRKERLRISRFKSNRTDVMFRVPKPFGRNGRYSPPKGTFTIAASPLRRGDFTCGTELGKTMSENEMLSGKPPQKTESKPLKAKVRKSVTITIRSSELWFVVQLSRLFTFGAPVNPLRRAEEIVQDPQEKMDELFLGGFNDFQLMRRFLFWSLCFCLLFPVGLSSCDGSDSAAVIFGGTTGKLTWTLTEDGVLTITGEGPMPDYRDGGTSETPPWYPHVNRISSLTIGEGVTRIGDYAFMLCSFVTKVVIPESVTSMGDWAFWHCQSLKRITFPDRMVRFGEWAFYENESLQSVCIPEGVTTIPSSAFARCHNLTCVIMPGSLQTICGGAFSQCHKLTDVTIPDGVTVIETGAFPSYLDMAVVTCLAVIPPELGKDNFGLPAKILYVPAGSVEVYRKNAVWREAFETIAALPMYKDAMEANSPVVRENCWEWYTSVVKTRMHNFSGELIVFTRWHEEDLIGTLCRREPFVEFTDWAQLDTLPPDTWLYLNFEALKTRPPSPVDPREPGEALWEELHGAELLRGKRRLDPVRFECMYQGRPSVREGLLYGDNFLTYEELPRDIVRRANYTDTADTGDDYLCSLCYVVDPDGVIYVTDAVYSREPMEMTEGLVGTMLRESGTRAALIESNNGGRGFARAVQALAPQVRVEWFHQSANKEARILSNAATVVHTVRFPCDWALRWPELYAHLTTYRWKFRANRWHDAADVVTGLVEREIAGRDTRIKSVKFMMSNEENPILFFAAVLAAGGVEAQEAADSMKIFYRRGYRNVDLSFRDNRAQMERFLNLTEAALKNDRVEKVVIRSYASPDGTAEANERLSVGRAEELKAYLVREGNIPASLIEYHAEGIAWGMLREQVAASDMAGRDEVLDILDHTPLWIYDDDNRIVDGRKKQLMDLQGGKPYNYMLEHFFPELRNSVSTVLYLHIVAQQNSETEPEPIAVVPSEEERAPQQEPVWVPADAAAMPCETTVPATVPAKPRRSYPANMIGVHAGYCTSWITSYGLTSSTRPGYEVGVSDRIRLGRQFPFYLRTGLTFISKGYEVRGFDDSRTTMNYLQIPVGIDYTVALGERFALIPHAGFYYAVGVGGKRKVGAEEIPVFGEKGGFSRHDMGFSCGADIMFGRFGIGVAYQIGLINIDKTDTMYGNDSQMVGYKNVRNRSFIVRAGVNFMILGLLSLVSCTEYDEVAMWNKNEDMGSRLAALEELCSRLNTNIVSLQQIVEALQGNDYVTGVVPVVENGETVGYTISFSKSGPVTIYHGKKGENGQNGTTPVIGVEQDTDGLYYWTLDGEWLTDDEGSKILAQGMAGKSAYELAVEKGYRGTLDEWLASLNGSNGDDGKSAYELAVENGYQGTEEEWLASLKGSAGDQGDDGVTPKLEVRDDGYWYISYDNGQTWNKLGPATGDPGEDGDSMFSDIDVSDPDYLVLTLAETGASIKLPYYKDKFDLLFVSGSDRVKEMSVYCGPGATAEVEYELTNPLNVQVAIECISHSGYEVAVDKSAKKITVSAPDDPAAITDPESEILVFASDDERTVMRKLVVKQVKYIDYRATRQLDWEKSSVNPRFWGEDCKFLDEQSTYDSATGEGRWAYTGTVIYITDAAFSGEAGLQEIVIPASVVEVGRNLWNETGGGGAFQNCTALTSVVFEGDNLSKINLNTFNGCSALSSIELPESLEKIEYNAFDDCSALKSIVIPDKVTYIGEGAFNYCTGLQEAYIGDGVTEIAAKAFAECTALKTVVIGKSIQRIGDQAFNTRSSWDQMTLEKITVLFDDIASGSFPVLESGSRGVFPKPGGWDLVSYKIYVPKGTKAEYQKNWSDYSSLIVEMQMARVVIGLSGGVDSSVAAYLLQQAGHEVIGLFMINWHDTTGTLEGDCPWHDDRLFAELVARRLDIPFHTVDLSDQYRRRVVDYMFSEYAKGRTPNPDVLCNREIKFDVFLKEALKLGADFVATGHYCRKAEETAPDGRTIYKLLAGSDPNKDQSYFLCQLSQEQLSRALFPVGHLLKPEVRRIAEQMKLATAKRKDSQGICFVGKVDLPVFLQQKLKAKTGNVHEIKADWPKYGQAVPLVGKTEDAGMGTAERTASDKSATLRGINPANTDSTECPNPATAPTATAAKRSSTPTDTELAALAAPYRYTVRDGKKIGQHNGAHFYTIGQRKGLGIGGRKESLFVLATDVEQNVIYVGEGDNHPGLYRRALRIAPGELHWIDPLRELKTGESRRFDVRIRYRQPLQGAELFIRPDAAYLLFDEPQRGITPGQFAAWYDGDELVGSGVIAEMLLSVARVSKLFGVEGGVLLNLYTTFPDDFSTEEPLFVKIDSLAVPLFCDRFERRGKTNALATFADIDSARRAEEFIGRELYLEHEDDENDEFYLEDLIGFRVRIGTLKGEITDYYDSEANPLFEVEIGGKRILVPAVEEFIAGIDFESRTVKMVLPEGLIELMAVKIRLARHGKKGFAFYHIVAADSRAPRDGKFIEKLGTYNPNTNPATIDLNFEKALDWLLKGAQPTDTCRAILSYKGVMYKKHLLGGVAKGAFSESDAEAKFNKWLSEKQTKIENKTNKLASDAKSAEKSRLAAETKIKEERAAALAEKKAAAEAAAREAAEAAAAESAEAAAPAEGEAPAEAMKKLFLFAIAVLLVCGCTDSGIDETPYGGSDNTENPGDGNDSEDEKPDIPEYSINGSVQKGQFIQGSVVTIQELNERLQPTGKSYQTQILDDMGSFELTSDIDSRYVEIIAEGFYFNEVTGNLSDAPLTLRSLSDLAMEGKSNVNLLTSLETPRIKYLVLNEGRTIPDARRTAEQEVLRSFCIPQDELPSPEGFDKMDIARPGVGNAILLAISATLQHGRTVAQLSEIVSKIATDIEVNGQIKDEALLAAVRSNGMGIKPARVTRNLERRYEELSITDYAIPPFDEYLDIDGNGVIDKLDDWFDHPFEERFELIFEPYDIEMRSFNVQVTPNFNDTWYYVGITTASYFDSYDDWRQFIQDMTPENSYSPSLYMDREILQINCIPGTEYVIYGFLDTNDFPNNIFIARVTSKPLPRNMNATVQAEWQLYDGTALETLYPDIYKGASDHRVFIFQVTPTSPETIHTWGLLHVARSTQLNLSDMQILDYLETGTLFGWKNVENGYYFLPAEMETFGFYYCGQDESGAWGELYYEELTFTEDDLCDPKSAPNSGFINGKSAVTPNRTALIATAFTAPVRFCKAAEYGRTPHLLPNMISHKTLYISDYIFSCYAFLFIFDFPNPLSKHILQFHAFFVQTTAAGADTVSSRNDQISTYMKVSVYLKKSSSSTSSICFRVREKNVDIKVVSPLVVHDKYWDSDTLSYKRTTAVPAVEQKLLPEQIASIIEKVEKTFSDKANSAWLKQTIEDVLYPARAFERNHPNLICRIHEYLEKFDGADRTKEHIIRFERKMIRYHEYQREILGNTDFTLFVETVTLEQMNVFRDYVTNEYLLRQQYPDFYASRLLINHAPRPLSNTTIINTMNLFCTFLHWCKKMKYSDNEVYELYGCKEPTYGDPFYLTSEERNVLYDADLNDYPKLAVIRDIFVFHCYIGCRVGDLYRLTRDNIKDGFLEYMPQKTKKCQAKVVRVPLHEKALKILERYESGTDRLLPFKPIHQYNLGIRELLKHCGIDRMVTILDTHGYNTVQKPLYEVATSHTARKTFIGNLYKQVPDPNLIASMSGHVEGSRAFNRYRTIDDEMKRNLWIMKVTAFIRKTAAKNNVTDQARVYFRVRDVGGVDIKAASELSINPNHWSAERQGYKPRVALVSEDKRMGFEKDIQNITHLIAEKYHRGVDGSWLKGLIEEYHHPNINFRGGNPADEYLLSYQIQKYMDETPLAAESWKHHRDNLKKVLRYERFHQEVMHQRGFHLCIDSITADDIRDFKLWMQEEYRYVEMYPVFYKDELPRDVAQQRSENSMSGTLYRIRTVIKWCIKRGLTRNNPFDQYQIAQPMYGDPFYLTLEERDKVYYADLSGMGATYSVYRDIFMFQCLIGCRVSDLNRLTKANIVDGCVEYIPQKTKLEHANTVRVPLNQKALDILERYKDLEDALLPRFSHFGYNKKIKAILKYVGIDRMVRVLDPKTREDVARPLYEVATTYTARKTFIGNLYKQVKDPNLIASMSGHSEGSRAFARYRHIDDEIKKELVNLLDMTESRLTYDQFKADILRWKNSHREEYNRFARLMANGDERQYLAICRAIFKQLPKVKIEWELCWGDDSVEDFDNINLLFSEESVPEQIVEAFQKQREENNASYGASSSFWNKVKSFFRSKSKRHGIILSAPLVLSWLYYGKSFEAMVSMVNKQSANPKADRMDRQSCSWVVERIIQVSIKNGFRTQADWDKYFSMNRAIENGTIGEWALQSATNENVTNDMTDEPEQQQQHTTKQANTEYFGDMPINDAPKSRGRQKAKEMPLVNYLNCANKDIVIDIIRKFISKYDTAAEQALTYYALNELGLLTDIGSAKEYATALIIQFDGVGGIKSESSYRQAIHLLTTTQHVMKNGVNRMCVMLNGDSCQTLLSELKAELAEAVNRMITIESLVDMGANVKLEVTPTDLKMFAESIIQRTIMAQQEEQKAAIQREAKEIYLNTKQVRELLNVCDGTLNLWAKRGYLVPIKVGNKNMYAKSDIRRVQTGGKSESVTSYCKRKEKMGIRQQDICNRVMAQAQGIAESDFPIDAFPAKVQCVILGMVRHENFKVEYLAAAMLSAAASALGNTYNIRVKGHWTTNAALYIIMVGRPGLGKTPPLEAVFRPLRKRDCRALEKFKAEMAAYQNTMKESKGNNDMDRPVLRRTIVSDFTPEALMLAHHNCPRGITILADEIMGMFNSANRYNKGQLIEQLLSAWSNSAIDVTRVSNPIPIHIENPCINMVGTTQTRRVHELLKKGYEDNGLLDRILFVMPKSYLVPRWTESEEEDTGSNPASAWRTWEAIMEKVFSLDYEVNDEGNIPHLIGMEAEAKRVFFNWHNNTIERINAIRDENLVESRPMKSPVQVARLALILQVLFYACGESRLQFVTTAAIEGAIRLNDYFEGSYRRIREYVANDACDEPSLELLSLLKNSFTTAEALDAGRQLKVTERTVMNYLKELAKNRLIHKVRQGVYEKVSFTAENRNCNVMDNYRFHLEKYHRGNKVACPECKRKACFTRYIDESGEITFPPHVGKCDHEHSCGYHYTPKDFFREHPDELDSFRQEWKPQAVTPKKPVSPPSFIDSAVMQHSLSHYDINPLYTFLSDTIGRSNTERLFKLYRVGTSKKWNGSAVFWQVDSNGQVHTGKIMGYDAKTGHRLKVPHPHVCWVHTELRLPGFNLCQCFFGEHLLVRYPDKTVFIVESEKTALIAAHFMPDGLWLATGGKNGCFNEKAVRILAHRDVVLMPDLVATEQWKQKTSMLANVCRSVSVSTVLEDMATDEQRARGLDIADFLLMEDTPQMILQRMIDRNPGLQTLIDELGLELVDAEQIMSNTQYAVCHLQRGSGNDSGMSCHIERKDAKGKKYVPANADAKRTSQNRELLTFPDGVANRTEAIQHRINTAGLRRKVSKNQTKAIRIMLTGTHEQMMKIANDGKLGSWIDVNLKWLKETFGDENLVSCVLHMDEKTPHLHATVVPIVTGERIRRKREGEKKYETKSGPRLSADDVMRRTKLHEYQNSYAKAMKPFGLQRGIVGSTAKHQANSEYYKQQMNRYEEDIAKLQADIEQAKEGRSTVLSWFGKGDLAKAKKELANKDEQIAKLKNQIKILMAEKSQLQEKHKADIEQLRNGYQKEIDKAIHRAETAERQFKEKDAIIDRQRKQISLLDRKANPQRYSLSSGAELVRINVSNYRNPSLHIWTRVGDELFENIKFQIDYDVAQSHFNGQITDEEFVNAVFDPQEQVNGKQAELLGAVFTLAAGGPAEVHVGTGSGGLIVMNEKTSKVIGKNKPKNLLWSRIGVIFRYSNNRMRFFSYLCVQNLTIQKMDKLYLTLLITFVSRTDKIFPDTTMVVIVDSLSKKTYKEKKAILMKIVNVEGNIVELRGYGYDENALAIGAPLQAASFENYGVVVMIEDDSIVRAQLNMFDRNISIVYLQMELERTFDENVYSNVDDGSVFPLFVRYSEKNVDFNNKNNSTSFEDMVAQIKGVHECCFIHRRQKNRDGKLLDELAIKIDEINISLTAKLARDGFSLINPVLSEKNIVLPEENEYSKRKCEIKFVDQNESELRLISGAGSYWLNHTEEISNFLKDCFALPIPPIEIHIEEDKEMWQAYLDGLNALLDAKRDLIKIEKVTKQKNGLVRLDFDMDSYIQNFKDKIEDELQGKCEIEPTVELEDGDCTISFDSYQIIPGDTIDAIKSIGKEYCYSAEEQVTNYVHGSLEVLSDPEELASIVADIEQEFHNFGSSFNKKGDNDFVASTDREIAILNRIVDKLCKGIAEVRNTTQIQVGLRPSESSFDINSVRSDLSFDCKIEAAGNFYIVTSRKPLTTKEQIFSKLSFVSCRASISPQSFNPEIVIDSASPKGDAYCWILNDIEQAQHVGSLFNQVCKNYPDQRVSSVYQYAFRPIIDKMILADLKYNNYENKSIFVDVPRSSIVLYPKTEEEYNTLKETIQSQLGEDVEIVFPKYTPSASVIFLCDDIEFRKSLFEKVGVELADNRKNFTLYKLKKDATRLDFEFNFTTIEEREKIIAIIRDCISGIYGIKLNFEKSNDKGVTTWSLTEDKSLKLELEQKLQSEYREEYVNFVNGKKYDEVSVIDDEEFASSKFRSRERMVKFKQRAFLKYNSPKLGTCKRRGIDFAIIQLDTEAEDGIDSGDLHITKGDYIQFPAMGEAMELLRQSRAMNRILRPASKFNHKPINENLQSFIFDPKYAGETVVSITDAVEDIKKNCISRPVPNDRQIEAVAKSVLANDLALIQGPPGTGKTTVIAEIIWQSIRRNPECKILLTSQTNLAVDNALERLQGQPGIRPIRIGKPDKLEPEGRRFSIPIIDSWTADSKQNGDNAAKIWIDRICNAISNDPKYATATSAWKKELEDQDQQSRSQFCRLYKKNVNLVAATCSICGSTDFMRTYCDIFGGNQNDDMFFDVVIMDEASKATPLEMAVPLVLGKKIIIIGDHKQLPPMLDENTIDSSLEKIGQKELAEKLRKAESQFKRLFESAAKVRKTIVSTLDTQYRMHEDIMNTIKQFYEEELAATGGLKCGILQSMDDPDLSNKGSRWHGLSLEPIFKPEYHAIWIDVTTPETRLNPGYKNEGELKAIDMVLKALQQSEGFDEFMKAQKKPEDKEIGIITFYSAQSREIKRKYKDCGYRMDVVDRFQGMERNIIIVSTVRSNAKNNIGFAKEIERINVAFSRARRLLIVVGNKRQFESNSNYAASIQSMKTFPVEQLRAALRMKNRRQKTNKKQQVAIVESLDTKIAKAVYAEKKISERIIGYFPYELQFVKATYFGTTQRPAKISAIEKGIVGILLIDGHSSFSTIGQILGLDVVNDKAEKSILSKALDGLRSFNAIEGDDDYIALTEAGKVYADKGERPDTYQKSFDIFVDSDHADWKTIKNALSTVNEHIKFINTKCEDLSLTIDEIKEYAAVQAQDVHYPQERYLLESADWKEGHKGSYKMYICFVQGVSTGIVRAFAFDENINSLNPVVAEYINSDATLASQLLDKCIKSECEMNFDTQILDEEAAKEAKANVSLDIIEAEKRLVDEEAEEEQIVEETNAENESNKVEKTSIAKSAKKTTVKTKDRLHKKALYDSVSFEVELQKIFKEDNPDEIWLMSPWIRKSAFMNDRGPLIENFLADENKRIFIAYSEPAQSPNDEKPMIDEEVEPGIKMLADQYPNFFYVQLPEFHFKNVIEVKGDQKILFSGSFNVLSFYVSEHQTHVRREEMALANPSIAKSKYVSFQVEFAEKYAERIKKEIEELSLEAVESYKNERMDYFLSIDNSEIKKLYLPIVELLEEKKYQGIVSSIRKRLTTIGQQLVALANTIGVNSKKKIELKKELDIIEKDMNTNSVDDPSLAELLSNNKQLVEHVKEQKIFPGRKEGFKGNNPQQRQTSPRTIGAVQQSGILSEDPEATKDGLSLYLARLSQAFINQEIKKTPMNDKLLAIVQDDELVKLMEMLTVMPSRNRDNAFDLSIGISSYLFRYPTLFNHKEEFTAKQKRTQQRLIQVNQNNIQEIVKKLSMSRFESSRFVRNPQVMHVDVLKSACDALGWQYTIQDNILTVSDAKQKSRLYGEFALKLNLTTNEVTYNTYYMPNATQKVLELQEQFYALNATTHMSTLIDIVRQIVGICYYRAIFKDGELYLRNRFRLIFIFRASNHIEAIYLFMLSAYYPVFYLNSFEYDRTKQKIEGIADLLRTDNKKVRIYTWNCVEGLMEKTPEGSLYKGEEYDEPEMTLKYIYKNENREIKDIFILEDLSNYIEEDKIKYYIRKIAEHAKFTNTHAIILSAIYKLPTELEKYVTVLNIPLPDRTDMERTLAVVERQTKKNLSVEMRNKMVDAALGMTSMEADLAFCLAAVKDSLGENAPYTVSAEKEQIIRKSGILDFFPKNESLKDVGGMDVLKDWLFKRQIAYQKRARDWGLQEPKGLLLLGVPGCGKSLTAKSIASFWNMPLLRLDVGKVFQGLVGSSEDNIRKAIATAEAVAPCVLWIDEIEKGLGGVQSSGSTDGGVTSRIFSTILTWMQEKTSPVFVVATANNINQLPPELLRKGRFDEIFFVDLPSKEERKNIFTIHLNKKGQNPIKNNYPMESLANNTEGFNGAEIEECIKEAMFDAYVENPENPQLKTTHLMNAILKTVPLSTTMKEQIAALRNWAATRAKNASIIVREEEQKEMPILLTRPELELERSFDLNNSKENKFGVYNSVAPPLAIPNREVKNVYADGTAKAGEMGPPEQEGKRLYLIYISMTELELQQYLLREYPQENARCEWKEFKNLKNSFCGDEKNDVISYVSAIANMDGGDLVIGVHDKTLEIVGTDTYNYDKQKAILRLTERCVNLSTEDLYIDEFITDDTNRKVWVIHIPKHLPKRPVFAHNKAWQRIEDSLVEMTTERMSTILDEPIFSETDWSAQIVSDATIDDLDEVAIAKARMMFKKVHSRIPEAEVNAWTVETFLSKCGIMKNGGITRAAIILLGKYESAFKLRPAVVQVTWTRRDEKQDVVDYEHFTVPFILTVDEILSKIENLTMREMPGGTLFPDTMKQYDDYTIREALHNCIAHQDYTMQQRINFVENPTYLYYSNAGSFIPGTLENALTNEEPQAYFRNECLCRAMVDFNMIDTVSRGIKKMFNEQWRRHFPMPDYEIDAKNRKVSVRIYGNEINKQYTNLLKTNDSLTLWDCISLDAVQKGRTIHEDVAQNLLNRGLIEGEAPNYTISLGIAKATNQLQGYTKQKGLDKEKMKQMILQYLKNAGTDGAKRDSIYEYIKDVMPQVKTHEQQLRLLGDILSALSVDKLIYAKGRIWFLKEMLLGERIKELRAEHGVLQRQLAALLEIDTPMFSKIERGDRRAKRTQVIQLAEYFNIDKNELLTLWLADKVLDAVEDEDELKHDAIEVAQKRIGMQFRHRSEQHAPDLIPHKPRIKYEAPCKSKIKIICKYKIFYLFFRMESKLTLYNTLDRRKETFEPINPPHVGMYVCGPTVYGDPHLGHARPAVTFDLLFRYLRSLGYKVRYVRNVTDVGHLEHDADDGEDKISKKARLEQLEPMEVAHYYTERYHRAMDELNVLSPSIEPCASGHIIEQIAMVKEILDNGFAYESNGSVYFDVEKYNRKYSYGRLSGRNLDDILTNTRELDGQGDKRHSCDFALWKKASPEHIMRWPSPWSDGFPGWHMECSAMSTKYLGQRFDIHGGGMDLMFPHHECEIAQSTAALGHDSAKYWIHNNMITINGQKMGKSLGNFITLEELFTGNHKLLTQAYSPMTIRFFVLQAHYRSTLDFSNEALQAAEKGLDRLMKAVEALDKIKPSEQSTVDPAELETRCREALDDDLNSPMAISALFDWVRIINQLVEGQQRITAADLEKLREIVRRYVFDILGLRDEKAASAGGKDLVTPLVNMLLDLRQAAKTEKNWALSDKIRDELTAIGIRVKDRKDGCDWEIEMELGTERIRKLLVQYAVPAIIAMTASSLYNMVDSIFIGHGVGALAISGLALTFPLMNLAAAFGSLVGVGAATLVSMRLGQRDYETAQRILGNVVVLNLIIGISFGLLTLVFLDPILYFFGASDATIGYAREYMSVILWGNVVTHMYLGLNAVLRAAGHPRKAMYATILTVTINAILDPLFIFGFGWGIRGAAIATVLAQILALVWQFRIFSDRNELLHFRRGIYRLKGKIVRNVLAIGMSPFLMNLAACFIVILINKGLKEYGGDLNIGAYGIVNRLGFFFVMIVMGINQGMQPIAGYNYGARQFDRVDRVLKLTIIGATCVTTLGFLIGELAPRLAVSVFTDDPELVRLSAEGMRIVFFCFPIIGFQMVTTNFFQSIGMAGKAIFLSLSRQLLFLMPGLIFLPRIFDELTPWDGSWGVWCSMPLSDFLASLVAGVMLFCQFRKFKAKAAAGRGEVSGAEVENDRRVNEMEQDKFVINIGRQLGSGGKAVGEALGRRLGVHVYDKQLINLAAEQSGLCTELFEQADEKKSRSLFSSLIGYLRMPFASEEGSVTDVLSSEALFKIQSDVIRDIASRESCIFVGRCADYILRDHPRAVNVFVTGAPEDRVRRLCEQENVTPEEAEAQMERTDARRASYYDYFSSGKWGEAATYHLCIDSSVLGIEGTADFIREFAERKLKMNLSGRMAGIKAWVEEYDAVVKEVEDLRLMPEFVKEGVVTEQELDEQYARAMHRIEELELRNMLRRDEDRMGAIMDINSGAGGTEALDWAGMLLRMYTRWGEAHGYKVKVLDYQAGEEVGVKSCTLEFEGEYAYGYLKSENGVHRMVRLSPFNANNKRQTTFASVFVSPAIDDTIEITVNPADIEWDTFRSSGAGGQNVNKVETAVRLRYHGKDADTGEPIEYLIENMETRSQLMNRENAMRILKSKLYQRELDKRMATQQALEATKKRIEWGSQIRSYVFDDRRVKDHRTGVQTSDVEGVMDGDLDEFIKAYLMEFGGQAMKNRLIQFLPVLLIAFVSFATLGIVQAQNRNPCADTPEAERLLSELTTACSEQSSEKIEKFIEKWEQESRTATIYDTNDKLTTTVYQLLDYLMEKYYFNNKELSPDKQGRIVNGNLVFPGEVPVYILSDEEYLDCFRPEDLSSHRWFSQMDYTPQRIIKGYRPCNAPQQIRFLKLIPSYKKAIDSFIDSEVKKSKSFIYSQHALNFYTSKFPVCYSSFLHYPNPRSSPYFSYIVINTSLTEAIIQCDYGFWGETDALQKKNGKWGPAAGNTISIHSIEMTDIFRFIRFFVSVASGQAADAVAARNLLSDAISLVPKESVRVGTTDTAMYYPRLAGERVTLLANHTSMIGERHLIDILHARGFDVTAIFAPEHGFRGTADPGEHMGGSVDAATGIPIRSLCDGNTRRPSDEAMHSFEVAMEISSFLHLNLLKGHGCKYTNLFRIGLKNRIKKQHFLRFASDSGILADFIHEMRMKIKTFMFAALAAFATLFAGCSDDENKTNGGGGNNGTGGDPVESEYKVTFSDTSYYSSVATFEAITENAKSQSFMAVVFETAFLEQQIPGITDNDIAKGVINYYKAEYMSQGATVADIYNVLTQQGRLHGSVTPLELDVPGLSAGTSYSVVVAGINENLEIVANGIVAEFTTKTLPGLEEENCTFEWTVEPKSTSVTMSFTPSDKKVPYFFYALTAEEYSSECRNDPAILKELLPSFIANLAKAYQMSVSEFMEKQRMTGDLEEFTLTGLLPKTGYVVFVCGMDEYGRPTTDVSVKDFETLEYVASDATVESVDVRLYDGEEASSIDPTTYKPDDYGGAYFLRYVPQFSEECAEVWNMLVIDVDLSGESDDVVLSYIMSMGFDANTSMMDIVKLPEGLMVYAYIVAQNEAGEYGNIYRCEPFEVSKANLSPVEELFPESNSKSGISSVAFSSVGKMCPKTVNSMKIVSVLMSVSVNKTYSAADLKFLNLLSEKFPTIADATTEIINLEAILNLPKGTEHFLTDLHGEYEAFRHVLKNASGVIRQKVHEVFNNTLRESEMTELCTLIYYPAEKLQLIKQKESNLDDWYKVTLNQLTEVCRAVSVKYTRSKVRKMLPPDFSYVIQELLHESDSPGSPKQSYFNGILNSIISIGRADAFIIAMSNVIQCLTIDRLHIIGDIFDRGPGPHFIFDTLAQYKMYDIQWGNHDILWMGAAAGNLASIANVIRVSARYDNLDVLEDGYGINLLPLARFAMEVYENSPCKPYQPKVMQNSGVTERDVLLMAQMHKAISVIQFKIEGQMIKRHPEYKMEGRALLEKIDYEKGTIEIDGKDYPLKDADFPTVDPRDPYKLTPGEDQLIRTLQASFLNSDKLQKHIRLLFSKGSMYLIVNSNLMYHASIPMTDEGEFKTVIVDGKPYAGRSLLDKLDRLTREAYFGGNGAKSQQMALDYMWYLWCGPESPFFDKAKMATLERYLIEDKKTHHEEKGAYYKHLDDTKMCSMILSAFGLDPEKSHIISGHVPVKTCKGESPIKAGGKLLMIDGGFSKAYHSETGIAGYTLIYNSHGLQLVQHEPFESAVKAVEEGKDIISTKVIVEATTDRITVRDTTIGKELQVQIDDLKNLLAAYRSGQIKERKMKARVYLSLGALLLFLAPLSCSDKAESPAPETPPEEQPVQPSEEYKEMYHSMEDNIKDEEPSLYYTYFRMRNASDQPLYIAARVRRNPYGFFYYLKPKEQATHWCCIENCAGLNFDMDQVLIKDLNKGLDYLEIYYRNDKAGTLGPEKDTAMLYNFIKPMTEEMVGTPRDPARWEYEEFPDRPRAVRWTIHITNEDYEEAVRATTERWKDWDRWSGEPIEWEMAYKISPDLCVACGTCIDECPVEAISAGDVYVIDPDKCIDCGTCAGVCPSEAIKPEMLTIKQLRDDREAAIRRLAKKGVDAAPVITEIEKLDDRRKAIQHELDECLATQNQAAKQIGALMGQGRRDEAEAKKAEVASLKERSNALNAEFKEVSDALQAAIVTLPNFPADIVPEGKTAEDNLVVKLVESYTQLPENPLPHWELARKYDIIDFDLGVKLTGAGFPVYKGQGARLQRALINFFLDCNTRAGYLEVEPPVMVNEASGFGTGQLPDKEGQMYHATADNFYLVPTAEVPVTNIYRDVILDEKDFPVKMTAYTPCFRREAGSYGKDVRGLNRLHQFDKVEIVQLSLPEKSYEALDGMVAHVESIVKALKLPYRILRLCGGDMSFTSALTYDFEVYSEAQKRWLEVSSVSNFESFQANRLKLRYKDADKKTRLAHTLNGSSLALPRIVAALLENNQTPDGIRIPEALIPYTGFDMIKMKSIELLAPAKDLQAAVAAVDYGADALYIGGARFGARHAAGNSAEEIARAVEYAHQYGVRVHATLNTLLYDGELAEAERQARELIAAGVDALIVQDMALRRMNLPVELHASTQAATRTPEQALFLERCGFARVILERALSLDEIRAIRAACGVDLECFVHGAICVGYSGRCFLSRSMSERSGNRGACSQPCRLTYDLVDESGRTVVKGRHLLSVRDLNLSDRIGELIDAGITSFKIEGRLKDVGYIKNVVSHYRQRIDRALASRPGFCRSSVGESRPDFQPDPSKSFTRGESEYFFDGRRAGVASFDTPKSVGEFVGRVARVDGRNFTLAGPHDLAPGDGICFRTWNGLAGTNVNEVAGNRIVPNRMEGVVPGAEVFRNFDRRFSLALDRSRTRRVIPVRADAAITPQRVTVRFTDCEGVVAEVTRDGAFEPAKDSRKMSETVAAQLSRSGDTIFDVREVRSEGCDRFVPVSLLAELRREGLERLRRARLDRPVVHAILPEDRSAPYPSKVLTAEENVTNRLAEEFYRDHGVTRIARGLDLEPATAGHPVMRSAYCIRREIGQCLKEHPTLKGELFLMRGRFRYRLRFDCARCEMSLIDESDRKMLSIGRIGLIISAVEVAGEFRFCGRLGEICSACTCSPQAGKRSRMSAVCRVRTGMFEALIPRFPDYELIDSGDFEKLERFGRYVVRRPEPQAIWRRSLTEQEWRRLADASFLRDGRSEERGEWRLRSGMPSRWTVDYAYEGMRLRMRLGLTSFKHVGLFPEQAANWNFIYDNCVRMRAEERTPKVLNLFAYTGGATLAARAAGADTTHVDSVKQVVTWARENMEQSGLEGVRWIVEDALKFVQREVRRGNRYNGIILDPPAYGRGANGEKWILEDNIGEMLECCARLLEPRGAFLVLNLYSMGLSATLASTAVRQAFGTPFEEQFGELCFDDRAGKRLPLGTYCRFVRMTTLSIVLGILTWCLISVLIGLVGSRRKIGFAWTFVLSLILTPVVGLIAALTSPRLPHGGEKWGFVHIGFMVLTALALISFLVVLFTGGIFFVAGGEMIFWELFVSYLKIGFFGFGGGYAMLSLIQNEVVVQHAWMTNAEFADIVAVSQITPGPIAINSATYVGYTVGMQSGSVWYGILGSVIATFAVCLPSMTLMILVARYIARLKGNPLVSGAMRGLRPVVIGMIGAAALLLMFPQDAGDASFIDFWSWILFGGVLAGSYFKLNPILLIVLSAAAGIAIYLMKQLWEIFWSFFKIGLFTFGGGYAMIPLIQREVIDHRKWIPASEFLDLLTLAQSVPGPIAINTAVFVGYKRSGLRGACASLLGAVLPSFLIILAIALFFAGIRQNPVVDAAFKGMRPAVVALIIAPLVTLTRGMHWSMIVLAAALAGLIWWLGLSPVLILAAGAGAGIVWELSIAKKSKQMQLFYAPDIVPPEYTLSEEESKHCIRVLRMACGEELHITDGRGNLYRCEIVDDNPKRCRVRVRDTNSEFGKLPYRLTMAVAPTKNNDRFEWFLEKATEIGVAEIIPLATEHSERRTLKPERENKVITAAVKQSLKAYHPRLHEITPLRQVIKQPFDGQKFIAHCDAPRSALGKAFLPHILHKGGDVLVLIGPEGDFSPEEIDLAVRGGFREITLGSQRLRTETAAVMATALVAAANESEIGTDDRQPSSKPVQMKRYSLFLISLILLMTTGCNQRKEVAENPFFEEWETPYGVPPFDRIRPEHFLPAFQRAMSIQEAEIDAIKSNGDQPSFENVILAYDRSGLMLEQVGLVFNMLCSADVNDQLLAAKEQAMPLLAAHRDNILLDEVLFDKIKAVYDRRGSLGLDAVQTRLVEKIYGKFVRAGALLDPQQKERLRQINGELALLPVKFGNNVLRATNDFMLKLTEKQLDGLPASVQGMAREKAAELGLNDAWVVTLDAPSRIPFLTYSTQRDLREQLYKAYIDRCNEGSEYDNRSLVNDFARLRNEKARLLGYPSYAAYVTADEMAGTPAAVYELLNEVWTPALDRAKEEMAEMNTMLQRDVPGATFEPWDWWYYAEKVRKDKYALDDATLRPYFSLENVREGAFSLANRLYGITFRPLVAPVYHKDCSVYEVLDVDGTHLGVLYFDFFPRSGKSSGAWCTAFRSQRYEGDERIAPVVAIVCNFTPPTKLTPSLLTLDEVQTLFHEFGHGLHALFADVKYRSLGRVEGDFVELPSQIMENWATEPEVLRHYAINYTTGEVIPERLIKRIRESGKFNQGFIVTELVAAALTDMDIHAITEYEPFDVNEFEADAVYGRRGLIPQIQPRYRYPYFLHIFDGGYASGYYFYIWAQVLDKDAFRAFEQTGDVFDRATARKFRTLLSRGGSADGMTLYRDFRGADPDKRAMLVACGLMEELPEEPADSLAVPVVTLEPNEKPKIMTFLTALAAGCADHTMPVAQLPEIDTNNPLLAEWNTPHETPPFDRIRVSDYEPAFDAAIAVSRAEIDAIVNNPAKPTFNNTIVALDRQGRLLSRVEGIFFNLLEADATPEMQQVAENVQPKLTALSNDISLNPQLFERVKAVYEHPGWFLSKEDKKLLEETYNGFVRSGANLSDEDKELYRQYSTELSELSLRFSRNVLAATNAFTINITDPAQVAELPDFVRDGMAAEAKARGEQGWTVTLQAPSYVPFMEYSTNRELKEKLWRASNSLCLGGEFDNTENIKRMVNLRLKIANLLGYPTYADYVLADRMAENAQTVNAFLDELLAQTKEYAVKDYNTIGEYARSQGFEGEVMPWDMAYYSEKYRHEKYELNEELVKPYLQLDSVKRGVFLLANKLYGLNFTPNPEVPVYHPEVTAYDVTDKDGRFLAELYLDFFPRATKRGGAWETEFRSVSIVEGHETRPLVSLVMNFTKPTDTTPSLLTFSEFETFLHEFGHALHAILSEGEHESISGTHVYQDFVELPSQIMENWATEKEFLDLWAVNYKTGEPIPADLIAKIVAAENYQAAYFNVRQLLYGLNDMAWHSIDKPFEGDVELFERTAMAPAQVLPVVEGAAMSPAFSHIFAGGYAAGYYGYKWAEVLAADAFSLFKEKGIFNPEVAEAFRREILSKGGHEHPMTLYVNFRGHKPETKALIEKMGLEKMTLQEEITRRRTFAVIAHPDAGKTTLTEKLLLFGGAIHVAGAVKSNKIKKGATSDFMEIERQRGISVATSVMGFEYQGRKINILDTPGHEDFAEDTYRTLTAVDSVIIVIDGAKGVESQTRKLMDVCRMRQTPVIVFVNKLDRPCKDPFDLLDEIEKELRIRVRPLSFPISSGDTFKGVYNIYEKNLTLFTSDERQTADASTVEINDLASPELDEYITERYANQLREDTELVEGVYDAFDREAYLRAELAPVFFGSAVNNFGVKELLECFIRIAPSPRPAPTETRIVEPAEAKMTGFVFKIHANMDPNHRDRIAFLKICSGTFERNKNYLHVRSGKQMKFSSPTAFMAEKKSIIDFAYPGDIVGLHDTGNFKIGDTFTEGEKLKFTGIPSFAPEQFRYIENADPLKFKQLAKGIDQLMDEGVAQLFTSSLNGRKIIGTVGALQFEVIEYRLAHEYNAACRWEPISIYKACWIESDNAEQLADFKRRKHTNMATDKHGRDVFLADTSYALALAQENFKDIRFYFTSEFMKTDFLVIGSGAAGLSFALKAAEHGHVTLVTKGKMDECNTNYAQGGICSVTYAPDTFEKHIHDTLVCGAGKCDPAAVELVVRRAPELIRDLIAWGTKFDKTPDGRFELNREGGHTEHRILHHEDLTGAEIERALITSVRKHPNITVLEHHFAIDLLTQHHLGEFVTRHTRGLACFGAYVLNLESNEIETVLAKFTVVAAGGCGNVYSSTTNPSVATGDGIAMCHRAKAITENMEFIQFHPTSLYHPAEKPNFLITEAMRGYGAILRLQNGEEFMDKYHPMKSLAPRDVTARAIYTEMTRRGEDFVYLDVRHKDPEQTRRHFPNIYEKCLSLGIDITRDLIPVTPAAHYCCGGVKVDLNGETSIRRLYALGETSCTGLHGANRLASNSLIEAVVYADQAAKHAASQLASVEIQEGIPDWDFEGTQHTEEMLMIIQSKREMQAIMSNYVGIVRSNLSLERALRRLSIIYEETEELHNKIKPNRELCELRNMIAVAYLVIKQGSALKESVGCHYNSDYPKPDNKMLKMERHIDIDRFDYDLPDERIAKYPLEERSASKLLVYERGEISERRFRDIGDILPEGTLLVFNNTKVIRARIIMHKPSGARIEVFCLEPHDPADYERAFAVKGSCRWSCIVGNLKKWKEGPLVIDFEYEGRAERMLAWREGEGGREQIVRFEWTADLTFGQLLEHLGRIPIPPYLNRESQEIDNTRYQTVYSKFEGSVAAPTAGLHFTPELIERMRTQGFSFEEVTLHVGAGTFLPVKDRDAAAHPMHTEHFEIRRSSVERLLEKWDNITAVGTTSVRTLESLTALAWRIRTSGAPDASRVIGQWELYDLPEVFTGREALQVLSDYMVREGIEKLKAATQIMITPLGYRFRIVRNIVTNFHQPKSTLLLLVSAYVGDDWHRIYDYALTHDFRFLSYGDSSVLMRMGIKFRLIVMNFLQYAIWGSWLISLGAYLGGGLQFTGLQIGSFFATMGIASLFMPALMGIIADRWIPAQKLLGICQLISAGFLVAAASQTAYGPLYTCMLMSVMFYMPTIALSNSVAYNALDLAKLDAVKHFPPIRVWGTVGFIAAMWFVDLVQIGGVQIKLTYWQLYVSAILSLILAIYSFTLPGCPVSHARKSQSWIDTLGLRAFALFKEKRMAIFFIFSMLLGAALQITNAFGDSYIQNFGTMPQYADSPIVRHSVILLSLSQMSETFCILLIPFFLRRFGIKWVMLISMLAWVLRFGFFGIGNPGSGAVFLILSMIVYGVAFDFFNISGSLFVEKETTPDIRSSAQGVFMIMTNGLGAFFGSYAAGAVVDAFGWPESWYIFAGYALVVAIVFAMVFRYKHKPEEMGAVSHMSLWTLTATAQEPVAETTSPVATETDSLQRVVDDLSQQLRHQKNEELDRKIWKNRSKYFNLGYVKQSLVFKDFGDEKLKNDFGVSISWGKTYYLHKKPLLGMLKFGLDWSWVDLNYSKYTISESEEPGSGSVGDIMDETIDIGNHQLEYGMQVGPSITINPVHELKISLYFQLTPSYSMMYLDDSFNSNFALFYSFGGSVAWKVISVGVEGRWGQAKYNGFSLEDADLEGISSTKTKLKTNSVRFYVGFRFMEAIRLDKYLWAVRIFKTRSDAAEAIRQNRVLVNDAYAKPSREVRIGDRIAVKRMPVTYLFEVVGYVSSRQPAKNVPDYCRNITPQSELDKLNIPRETVFVFRDRGTGRPTKKERRELDNLMEEIYLEEEEEMLLPTSGSKIVGQPAAAHYRLRLCSDILSRIVSTTENPNLPEPPSLPTSDFACTIMEAEKQTEKTAGNPNTEGTTVQTDAPGQEPGMKLFAGDKVLWIIIAALAVISVLVVYSSTAKMAYDAHTARSTAHFLRQQLLILFVCVPLIIIVHKINSRIYNHLALVAYAGSVLLTLAVYFIGATTNGAARWIPLGPFQFQPSEALKVATVLFLARQLAGRQSVIDKLRIIPSLNPLRWKRPDQRKIWREGTWPILAPVLLSCVVIFPAHTSSAVLVFFASWVMMLIGRVRIRELVKLLGLAFAAVMLAGLLNLGRSETAGGRVETWIDLWTKPQTEKPIDQLTDTERSMIAIHNGGILGEGAGQSAMRVEMIHPESDYAYAFFVEEYGIVLALLLLLLYLWIFFRAIEIFRRCGTAFPGLLVLGLALLITCQALLHIMVTVNLIPETGQTLPLISRGGSSTIFTAIALGMILSVSRQNDEQSHDMPKSESIYEKMKKIVVLGGGISGYGSAILAKKKGFDVFLSDKGRIADRYKAKLDQWQVPYEEGRHSEERILAADEVVKSPGIPDKAPMIVKLREAGIPVISEMEFAGRYLGKARTICVTGSNGKTTTTSLIYKILRDAGYNVALGGNIGESFAYSVATGDYDWYVLELSSFQLDGMFRFRAHIGVLTNITPDHLDRYDYCFQNYVDAKMRITQNQNSRDFFIYSGDDEVIWQQLPKYDLRMKQLPFAAKNAVASGAGDAFLLDGKFTATVGRESVEIDTAKMRIPGLHNAYNAMAAALAALAAGVSPTRIRSSIYDFAPVEHRLEPAGEIGGVTYINDSKATNVDSTWYALESMKRPVVWIAGGTDKGNDYEPLKRFAREKVHTLVCMGIDNRKLVESFTGIIPEIISTDSLDAAMQAARKASRPGDVVLLSPACASFDLFKNYENRGELFKQWVAEHAKMLYHLFKYFDNVHNLPGAGMFQYISFRAAAAIIIALLIVIVFGRNIINFLRRKQIGEEIRDLGLEGQLQKKGTPTMGGVIILLAILIPVLLFGQLDNVYIQLMLVSTIWLGLIGFLDDYIKVFRHHKEGLKGRFKIVGQVGLGIIVGTTMCFSPDIVVREKTTEPVETIYLDEHGRTIADHIQRRIVSSESRQTTQTTIPFVKDNEFDYSWLTGGNRTLTWILYVVVAILVVTAVSNGANLTDGLDGLVTGVSAPIVLVLGILAYLSGHIVYADYLNIMYIPGSGELVVFAAALAGALVGFLWYNSFPAQIFMGDTGSLSIGGIIAVFALCIRKELLLPLLCGIFLVESLSVMLQVSYFKYTKRKYGEGRRILLMSPLHHHYQKQGFFETKIVTRFWIVSLLLAAITLVTLKIRMKQIQELIKATQVLRVEGNSDTRVSRLAYDSRRIAPGDCFFAVSGTQSDGHAYIDAAVAAGAVAVVCQRLPEHLTPSVCYVVVADTNAAMADMAAAFYGDPSRQLKLVGITGTNGKTTTVTLLYDLFRGLGYKVGLISTVVYCIDTERIESTHTTPDAIRLNEMMARMVEAGCEYCFMEVSSHAIVQERIRGLHFTGGIFSNITHDHLDYHKTFAEYIRAKKLFFDNLPKEAFALINIDDRNGRVMVQNTRATVKTLSLQSMADFRCKILETHPDGMELRIDGREVWVHFLGRFNAYNLLCVYAAALLLGADREEVLQIMSTLHPVSGRFEFVRAADGTTAIVDYAHTPDALEKVLQTVEEIRHPGQQLFVLCGCGGDRDKTKRPEMAQIAVKYATTAILTSDNPRHEDPDAILDDMVAGLAPGDRYLRIADRAEAIRTAAMLAKPGDILLLAGKGHETYQIVGDVKNHFDDKEEALRAFALYAKNMSKMKPEKSRIKSDILLRVRLLYILFILAGLLIFARLVWVQLFSSEVAYNAERLAGRIFTEQIIPAQRGNILTRDGDPLATSIFRYRVEFDFGSPGLDSVRTFHEQSDSLSKLLAAYFGDRSAAEYRRMFRTQHAKHYQVKYRKDTLVPRSEGRIARWIDRILDREFVPKKLYDTLRDHTPVQIFPRDIDYTEWETLRKYPLLNWNMGMVYNLRESDERIYPQGELGRRTIGLTGDRGNYGIEAVYREELAGRDGRATRQRIARGFYGRVVDGDNIDPIDGLDVVTTLDLDVQDVANRYLREQLEAQNAIWGTTIVMEVRTGEILALVNLGRTPGGGYAERENYAIGRNTEPGSTFKLASMLLLLDDADMPLDQTYDTGNGRVVKVGGIRVQDSHAGFNDMDFRTAVAQSSNVYFAKAIWERYADNKERYSDFMKKLHLDQTVGLEAFGEKKPLFQDWKEVPDPNSMLVRRSFGYRIKLSPIQVITLYNAIANDGKMISPILVRELRRGDDVVEHFKARTLVDKICSERTLREVRKLLESVGTEGTGAGFFRDTTLYTVAAKTGTAQYADDKIGYRDGYYIGSMVAYFPAHNPRYTVLTTIHTKRQAGKSYYGGPLSGPVVKKVVTYLYNREHDWDLSPENSGEKHYPRRIKGGDIAQIRRIADKFSPRTSFEDRKGWGTVRIDSLSNVTISTLAQDDQTMPNVVGMGLKDALFLLESRGLRVSFSGRGSVQYQSIAPGTRISRGGAVTITLKMKYNDHEFDPVTDEERAAREREEELARRIRREVLRVQSGEADEEIRADREREQAEEEARQEEQRKEERRRSNIFWLLFSGNILVRKGASEYYRYMICIAAMFFVSIFVMFTALHLDMKYSRLYREVQMLRERSTRLQEQRFRHTTHSAILEELRRRGIDLYDPVVPGEILDDMTSVYHTPVLLEESVRLLDIDPAGTYVDLTFGGGGHSRRILSALGDRGRLYAFDQDRDTRDNCPEDSRFHYVESNFRFMRGALRLHGVTRVDGILADLGVSSHHFDAVERGFSFRGSAPLDMRMNQRGGGTAADLVNTLDADALTRILGDWGEIDTPWKVAACIVRARTAQPILTTADLVAAVAPCTPKKDESKFLTKLFQALRIEVNGEMEALKMALEQSLKVLRPGGRLVVISYHSLEDRLVKNFLRSGNFEGRIEKDFFGKPETPFEIITRKAVTPSSEELVRNPRSRSAKLRAAAKIVRQMQGKIVIFTEEKTVENGRTPEGRGVPLPGSPCTDAEFRLEIRAMPKIDVDAVLAAKAPRIARWVPGFVIRWLKRTIHQDEINYILDEYSALPPQQFIQACFKFWGVTYSVEGLENLDPKGRYLFASNHPFGGMDGMMLADELVGYFGDARVIVNDLLMHVEPLRPLWIPVNKHGSQCGEYLRRFDEAFASDCPILTFPAGLCSRRRQGVVSDLPWRSNFVKRAAASGRRIVPVFVEGELSDFFYRLSNFRRKIGIRFNIEMLYLPDEMFSQKGKHFRILVGEPVSTDELVECGSWQQRADYVREKAYSLEKKLRAEAKHGMEPIIEPVSRSLLLAELTPERKVRNTNKASNEIYIFDAAECPSLLREIGRLREVAFRSAGGGTGLAVDIDEEDLAGDGYYQLIVWDPAEQEIVGGYRFIVCTSENPRHLSTEHYFTFSDKFRKEYLPYTIELGRSFVQPSYQSRGNSKSIYALDNLWDGLGALVVLNPKVKYLFGKVTMYASYKAMARNALIWFLRRYFPDPDHLVAGKNPVQLDLDDPYYEHFFTGKTYEENYRILIQRIREFNENIPPLINAYMNLSPTMRVFDTVINTDFGGVEETGILLTIPDIYPEKKQRYMRWQGWRENLKQRREHFRLRLQEHLSRIGKRWEVMRTRLVVSFFICFLLQACSGASTTKTNGVSNTSGNDQAGCIALDTIGIDGAVEKFVWNEEDGIGFLIQDNSYLDFIKSSFTSRPVFAMQAADGRITYSTEDLMKEMWPKERIEDPVSVVAWRPYGFALQEDGSFFLPVGVAQYDEKGCRSVPMLGRYRGNLAEMTLDFENMFSAVELRLRKDSFALEPIKVKQVILQGNDGEILAGSIKVVASRQELPDSVCEERKVSPCVVLDCGSGVELTEESTSFYLPVLPVEFRRGYSLTVVTDRDSGNMFRIQCGGKFPVRLKKGRIYRAADTIVRPAYLQYMIPDPNFRAYLLEQGYIEEIGENGSRVVVTPAGRAATKIDCSRRGIASLAGIEYFPLLEELNCCMNMISTLDLTQNPRLVKLDCSGNCLKSLDVSHNSVLMELRCMLNELVALETDRNPKLTVLHCAFNRSLKALDVTGNPLLKELVCTENSLSSLDVSHNLELKKLMCGNGFVKKNRLETLDVSKNTKLDTLECSGCWLKTLDVSRNRDLIYLNCSRNELERLNLGAVPNLKELDCPMNKLSRLDVSRCKALTWISCDRNSLSSLDVSHNRSLNWLSCGENLLTTLDVSHNSVLETLWCNDNQLTTLDLSGNPILRKLYCCNNRLSSLDLSKNKFLEPRNVSDHGNCFPEEEGSIVVNSCCFMGNFKEDIVKTEAFIFDVDGVMTDGGIMPLVDGDFIRKYYAKDGYAIAYALRMGYKVCIITGGRGATLDHRLKMLGITDVYLDCMDKISAMQDFFARHGLDPANVIYMGDDIPDLECMKAVGIPVCPSDAASEVIEASRYVSEFAGGHGCVRDIIEQVLRARDDWARDSRGMHSSNIAASRMKNIVLIGSGNLAEALARAISRTEGATLLQIFARNAKRGTALALENGTAWSSDPRELAAADLYILAVSDAAITTLAESLPIPAEAAVVHTAGGIGIEALPARFDRRGVLYPLQTFTQGRSVDFAKIPLFVEGNDDSFTSELEAFARNLSRTVYRADSDRRVRLHLAAVFACNFVNHLYALGGEILHGTELPFDVLKPLIAETAAKAVDSGDPHRVQTGPAVRGDLPTLRRHEAALAHDPRLLRIYESLSQDIWETSKKTSMKVKNVFTYFTDTILRRNANSYRNPRVRWAVRQYKLLFYTARGLIAHDTIVRSAALTFYTLISIVPILALVFAVVKGFGLLDGLIDDLYALFPQNVEVLDYMVEFARKALANTQGGLIALVSVVTLFWAVIRVFGSVESAFNNIWEVQSSRNIARQYLNYIVIAMVAPILWLVASTMGGYLLRFFDAGNTFLGILLSKLSALVIIWGSFTLIYAVVPNTKVLWRSAFMAGIVAGTVFMLFQWGYLYLQGWMTSYNAIYGSFAALPLFLLWLQISWEILLFGGELSFAYQNIDRFAEERESLGISNDRRRRIILAVMLQVVHRFRENEGALPVDELRRRLSLPTRIVNDVLHQLVRTGLLIEIRNPDDDREVAFAPGRDIHEMTLYNIFRTIDNYSSTRLYFAATEETRRIDRALDELQTACRTAGDRLRLIDLDDAVNAARKPASGPQPESKHSERMERRTEKIGIFAPGMMTPEQYRLLLTPEVRRTVEEQIGRDPAAIALDKRIPHAALVATQVKYLARARTKLPSYYEARCILPPLAFEQASSEACAARKSCSGNTVLDLTCGLGVDALYLSKRFREVITLERDATLAAVAEENFRRLGATNIRVINSSAEAFLASTLDHFDWIYADPDRRSAGGRKLVRLEDCSPDIPKLLPELRRIAPNLCVKNSPLFDVGETFRLFGPCRTEVVSLHDECKEVVVYTDGTGPLLTAVALELGEFSCTPAEARATPCDKPFDPAAYRWLLIPDVALQKARLTPTYLQGHADIWSPNGYGFAAEKSEDTLGRWLEIERIEPYNPKQLKRELSGSRLTILKQDFPLTAAEIAARLGIREGGERRIAFTKLGQDYWTIRLKMLRALPPLTAGILLADHYVLPLWLLVGGFLVCGILALLADDRGANLATLGAILLFGMTVTELRHTPAPPTGTPGEYEIVVRERLSEREGKTASGTTIRARRNSATGEWLPAAGNLVVRCDSSTALNPGDRAVVRGKIYPFTARHGGYGRLMTRRGYVGTLYLNRSSLLLRDTLHRELSPKHLSLFLHERAVARLDRLALAPDEQALCNAMTAGDRRSLSPALRAAYSRSGTSHLLAVSGLHVGIVFLLANLLLWWLPLFRHGHILRNIAVILLIWLYAATTGFPPSVVRATLMFSVLQFALASSSEYVGMNTLAGVAFVMLLFHPDYLFDISFQLSFIAVAGIIAWGLPLCRLLRTRRKSIDMLTATLAIGFSASAATAPLISHTFGQISVVGLALNPVVILLSYVVVGSCTLWLVIPGTVLAPLFSVVAGFAARAQNELIRAAAALPAAALDIRLTTTQCWIVYGLFIFATLLLWSAERKKSVSSLPEMSVFGFGGFPIRKDNCFFGRMSRSDVWIIQNDTHRMEMLLRTFYDTARNYTMYYDTSTYTAYWVAYPLAAGDLGSGRPNDPWAATPGIPTSQQINVWAGSYGVNVGSTSNIYARGHQIPNADRNKDPYGTMCAQTFYATNSTPQIQNGFNSGIWSTLEGDVRTLAQQQTDTVYVVTGAILRTVTGNETITYIKPAKDTKNCPVPNYYYKVLLKVKREASGKISSASTVGVWLPHRVYSGESYQSYTKSVAEIEALTGYNFFANLPADIQAAAEQNSNWSTFASFMKTFFKSILAVAVCASLFAACSKDDTVSDPSNGRKVTMTVTASSELESASGSRTTYDPLTGKISWNETGEYLQVFETAASKTTYANSQEGTVSDGTAKFAVSFPENTNTPLVYNAVYPASAWVTSNNTDITNMKVVTRTSQQPTATSFDSNADLLIAKSISLESQPTELQMSFGRAVAIGKMTVKNLASEEPVLGVEFTAPDKKVTGRSYVDMTAGTVKEYGYPGNFSDNVTLSYSSEMNLKANGATGMTAYFTCFPFEVAAGETFTVTVTTATKIFTKTVTVQEGRALAFAAGDSSTFAVDMTDAAEETTETLSGDYVITATQSEITYAMSSLADGSRLAPVVITPSNPYKTGDETLIWTITKSGDNYTISQGKNYLSWESDNSATISTEAYDLIITKDKDKGTYQIASAATPSRILAKNNTANLGFGFYTGSQTKDLTLIPAEYVKLPQITLDPSTLTLSYNDTETHYIPVTLKNAETQDVSVAIYDGTEGTEQPDWITTGDYNGSENRLEVAATENTVATPRTARIVLTATTSLGTANATLLITQNSKPEGGVGETWTYTFESADKDKIAAGLTVNGLTWTASKAPTAFDTNSGIRGLSWSKPSGVTIKTSDYTGGIKKITLVMSANTANLSTVNATVGGQALGETISLAKTNNQEYVVESETPLSGEIVLTLNTESGGKSLMIKTITINMIMKKHYESTVKGGGTSYSAPSVEILSISIEKGFANSTVLDYGGAGEAGGSVNDTDYGEYMFESFYIVSWLWATTNIDNIQLRNKKESKIHRIFIFRCGLCVKASEIMIFFGILDRLKAKYIFSGALLLLFLLPVLGMALPGGVQHPATPERQTPPDSTPTQAVQKSRRETRREIRRLQREADRPPTAETRTEEEQDSLFDTRIDSIFGAPPLSPIAPADSTAPTGNDSLLRDSLRQDTTQRDTTRKKSFLDDIISGKNQDSLYYDVRNRTVYIYNQGDINYQNMNLKGDFMRVNMDEKIIYAHGKRDTIDGKPTVTNPTFTEGAANPYTMDTITYNIGSKKAKIKGVATQEGDGWLIGNNVKKMDDNTIHIQDGKYTTCDQTDHPHFYLAMTKAKVIPGKKVVTGPAYLVLEDVPIYFPLLPEGFFPLSSGPKSGLLMPTFGEESTKGFYIRDLGYYFTLGEHMDLAIRGGIYTLGSWEASAMSRYMKRYKYNGTLNFNYSNVRVGDKGEPDFLQQNNFQLYWQHTQDPKANPGSTFSASVDFRTSGYNRYSATNLNQALQTQTSSTISYSKSWLGTPFSLSANMSVSQNSQSGTLSIALPNVVFNVSTFYPFKRKEAMGKERWYEKISLRYTGKFNNKANAKESEIFTKETLQNMQYGFEHSIPISATYNIFNYINFGPTINYTEKWYFKKQEQVWNPVLNRIDKLDPEYGFYRLYNYNFSLQASTIVYGRYEAKKKTRKVQAIRHTITPTVSFSYAPDFSKQKYGYLKTVQSDTLGNFKTYSPFEGSIFGVPSSGQSMAINASLSQTLEMKVLSKRDTSGMKKIKLIDELRIGQVSYNFLADSMGLSNIPISLRTTVFQNFGINISATLDPYRVTPQGQRINKLFFPGRVVSASTSFGYTFQSRQDNSTPAINDINSAPIDPAYANPFYDPYGQMNPALRRQYMTQAYYDFSLPWNLGFNYTISYSSSPTNNGTTGYQKNITQTLGINGSVTILPKMGVTFQGGYDFQAKELTPASITITRDLHCWQMSFAWIPFGHYQSWSFNIGVKAASLADLKYDKSQSMFDNLYMRKSLFLVALFLIATLSFNGVAAQNIAQGVRVVVIDAGHGGPKFPGAHYRGVYEKDLNLQIALKLGALIEKEIPQLKVVYTRKTDKQFSESLTQDLQARADIANKAGGDLFISIHTNAAASASARGVETLIMGESPLEKNANERALYYNNQEELLDMSNEKTAAIVRAYIQNLQFTYGEYSEAMARLVQKHYVKSGRHNRGVKRQPLKVLYATDMPGILTEIGFLSNSEEYAYMNSAKGQAQIARALCDAVKDYVAFVRGALLVDDDAIYEQADADVAEPASAAASDKADKGSVKTGKAEQEKTFYAVQLIASAKRVPPKDRQFKSYRGKVTEFVTGGRFRYKYCVGRFDTRKQAEAKLAEVRREFRDAFVVSCRGDRIVQMRREVKIGIFAVLMIGALWAGIRFLKGFDIFSRNAVYYAAYDQVDGVQNASPILIRGVKVGAVTDISFDPSIGNEVVLQLTIQRKYRIPSNSEARIYSNSIMGAKAIEIALGDAGTYLQSGDTLCSSRSKGLMDMAGSELEFFKQKMSQVVGDLSRTMDNLNLIMEQNAANIEGTMSHLNSITGSVNGMLLSQRANLESAVANLTRFSEMLGENSPRMDSIILNLSNFTDQIQRENLAGALDSTLMNLNAILARVNAGEGTVGQLVSDPRLYESLNEATANLASLLANLQAHPARYVHFSLFGRDPEKADRKQQKKEAKHARRDSLKALKAARMIYPANFEQKVGFDRLREQVAALCTIRGGRERLCAEQFSTSQADVERRLALADEMRRLLEMERDFPDDEFVDVDYILSKLKIEGSFLEVEEVVLLRRALASAGAIAGFILGRGEELYPELRLRSRGIEAFPEIVRAIDGIVDQYGKIRDDASPELQQIRRMIREREGQAAKRLQQVLSNAKKAGIVEADAMLSIRDGRAVIPVAAANKRKLQGFIHDESATGKTFYVEPVEVVEINNELKELEYAERREIVRILSAFTDSIRPEADRIALIGDYLSDLDMIRAKARWAVANGAVKPIVSTDDRLVLRNARHPLLQQTLRAQGKQVVPLDLQLDKRRHILVISGPNAGGKSVCLKTTGIIQYMFQCGFLVPASENSELPLFRNLMIDIGDEQSIDDDLSTYSSHLLNMKNMLAGASNRTLVLIDEFGSGTEPIIGGAIAESILERLRSKGCYGVITTHYANIKYYASNTEGIANGAMMFDVQNIRPLFRLEIGKPGSSFAVEIARKIGLPEDIIRDAGEKAGSDHINLEKQLREIARDKHYWEQKRDRIRIADRKVEELEQTYADQLSRIRQERSEILKKAKEEAQRMIADANRQIENTIRTIREAQAEKELTQLARKELNDFRDRVERTDAADAAHDERVAREMEKLERRRQRRAERRQQAGETPEVAQPAVPEKPREAEVGSKVKIAGQDIPGVVLSIKGRKAQVAFGQILTTVDRSSLVVISGAEFKQATRPVQPRTVVSVDVSARKLNFKDHIDVRGLRAAEALEEVRDFIDDAIMVGVGTVTILHGKGTGALKEEIRRYLRTVPEVERAADEHADRGGAGITVVTLRMDMKYMLSEIARICGGELIGEDLPVARVLTDSRNCSFGEEPLFVAMKGTNHDSHAFIGEMVRRDVKAFLAERKTQLPAGCGCVVVPSAIAALQQLAAHHRTRFKGRVVGITGSNGKTVVKEWIAQQIPAGVKYFRSPKSYNSQLGVALSLLMIEGDEELALIEAGISCPGEMVRLERMIRPDTVIFTSIGEAHQENFTSLEEKSAEKLVLAKGARTIIYHGGSSLLERMIRTLYGGRQLQDAAEYPLPEQLPAGVLESGAGRVDAQLVGAFCRVMGFPDPDFGRIRPVAMRLELKEGINGSLLIDDAYNSDINSLSIALDYLHNMAAGRPMTLILSDIEQSGVEDGVLYGEVARLVAAAGVSRLIGVGDRIRNAGANFACDSAFYRTTDELLRNLRRDDVAGRVVLIKGSRDSHFERVSHALERKSHTTVLEVDLDAMIHNLNYFRARLRPGVRLVAMVKAASYGAGDFEVAQMLQHQGVNYLAVAFADEGVLLRERGIRMPIVVLNADEGSFDLMVAHRLEPEIYNFRSLAFFSKAVERVGEESYPIHIKLDTGMHRLGFMEGELDMLTETLGETPSVKVATIFSHLNCSDMPQEDRYTREQIARFDRMSGRLAAALPYPVLRHTANSAAIERFPEAQFDMCRLGLGLYGFGFEHNDELKPVSTLKSRIVQLKHLSAGEAVGYGRAGKLTRDSVTATVPMGYADGLDRHLGCGRWSMLVAGRPAPIVGRVCMDSCMIDVTDIPGVEEGDEVVIFSAVPGNTPEDMARVLDTIPYEVMTSVSGRVKRIYSKEMSQERKPGQPGTLYLIPCPIAEDTPVWDVLPAANRAVIDSLDYFIVENVRSARRFLSKAGFGRPIDSLEFRELNEHTTDARAVDEMVRPILAGRSAGVISEAGVPGVADPGALAVARCHRLGIRVVPLIGPSSIILAVMASGLNGQSFAFNGYLPVKPPERARAIRTLERRATGERQSQVFIEAPYRNAKLLGQLLEVCAPDTRLTLAVDITSPQEYIRTLTVREWRSALLPEMDKRPAIFILGMDKEKVYNEAVGGDEGFAAGDGYPSCDGEPCANVTDESSADADTMAGDRNTPKAASEELPSRDWEAEIAEWQDKYLRLQAEFDNFRKRTLREKMELVQSGSAECVKNFLPLMDDLQRALEAIEKSNDLEALREGVKLIAQKFRETLKKQNVKEIEALGLELDTDHHEAVARFDAGKEKKGKIVDVVQPGYKMGDKVLRFAKVVVGEMAEKRDYYEVLGVAKNANADEIKKAYRKAAIKYHPDKNPGDKEAEEKFKEAAEAYDVLSNPEKRARYDQFGHAGMSGAAGAGGGFGGFGGGFSMEDIFSQFGDIFGGHFSGGSYRTSSSGGRRVSRGTDIRVRVKLTLAEIAAGTVKKLKINKQIACPKCGGTGAKDANSYSTCSTCNGAGYVNRVENTFFGRMQTQSVCPTCGGTGKVITNPCDECKGEGTIKGSEVVEIRIPAGVGDGMVLTVSGKGNAARHGGVNGDLQVVIEEEHNPELVRDGNDLIHNLNITVPTALLGGSVEVPTVDGRARIKIAPGTPAGKVLRLAGKGLPDVNGYGRGDILVVVDVTVPAKLNAEEKRLVEQLAAQPSFQRAEASKGHNIFDRMKSFFRMLLPIGMQPSKPVISSVKIRKTPGITSHVTPGDLTFRPMSGFTPFKKHANKFNYLPRYYDPEKEERDRRRAELRGERAEDAGKEYKPGQYIRTQSQARAARRREEMSRGSGRMWMMVVLVVLVLLFLVFGYPRVVAFISDMQKPKTPQTEEFNPYTPITVVPNDYEEMADRIKLLPEVVANQIAAGEVVNRPSSVVKEMMENAIDAGARSVKVNFRDGGKELIQIVDDGCGMSPIDARMAFDRHATSKISSLDDIYALKTFGFRGEALASIAAVSQVELRTRQAEDEVGTLTTVNGGEFVSQTLAACPVGSQFYVRNLFYNVPARRKFLEKSTTSTGQIKSEFQRVALCNPQVGFELLMNDQPLYRLPAASLASRIVDVVGRHIKQNLLEVDADTSIVRVTGFVGRPAAAKKSNSSEQYLFVNGRYFRSPYFFKAILKAYEKLIPDACSPSYFLYLTIDPSRIDVNVHPQKTEVKFADEEAVWQIINAAVRETLAKTGAVPLMDFDQTDSVEIPVLTKGAVYREPKAMSNESYNPFRADYASDVSERMPDVDFSGFDAPYDGEMPAGKGVGAEDRYDEMIPSAGFAPTEMEFIPSAGEPVQQRLMDDPAACFSGVTVLGNGYASALYGGKWVVVDLRRARERVLYDNYLLLLTNGSSVSQQLLFPERLAFSENEYALLEENAVDFAALGFDLEFCGGGAVEVKGVPADIPHDTIDRLIYELLQEFAVPVDVQALRREKIAAVMACSGARSMSRTISTEEAESLLGQLCEGGNVSFTPSGKAVMAKITLEEIRNKLGMNNSRYFSSTPPVVLNLIIINALMLLATELLPVGNRIVGALALFNVESPLFHSYQLVTYMFLHGGFSHLFFNMFALWMFGRTLEYELGSKRFLTYYMVCGVGAGVLQLLVGWLEYRYGNVGMMALMVPTVGASGAVFGLLLAFGVMHPNAVIMLLIPPIPMKAKWFVVVYGVIELFFGISGRMDGVAHFAHVGGMLWGFLLLYYWKHKGVIRYMSREYYDDYRHGASRKRRKSLPGSVFNGVMLILSVATGAAMIVTLLAPFVHPGRTWIFPVLGLVAPAVYVITLLVTLYWIIRWRWRIALPLVVLLLAGLFKVPLFLKPELRRHYGEETSFGRGAITLLTFNVRSFYNDRGQWSFDGVTEVIRRVNPDIVCLQEFNRTSSKAEELDSLLSDYDRTVVMEGNRRDPVFPLALYTKYRILGKSHSILGPMKQDGQSVWVDLLVGDDTIRIFNNHLHSTAITVHDDKYLSEHQFLTDTAGGAKIKNIFRRFRDNSMLRAAQADTIARAIAATPGCKIVCGDFNDTPMSYTYRVMAQDLDDAFRASGKGYSYTFRGFMDVLRIDYVLYSEDLECLDYQVLYDVDLSDHYPVVVRLRPVKRMILDSLRNWAFYCGADSRLKRALEYLAAADLNTLEPGRYEIEGAEIFMKVTEGELKREEEASLEVHDKYIDVQVLIAGEVETMGWRERRECRVPRGPFDAEEDIRFFADRPQLFVGIRPGQFVVFGPEDAHAPMIGRGRIKKAVVKVMKMAFTEILPGIHYVGVNDRTTTRFESLWSLPYGVSYNSYLVIDEKVALIDTVEVSFGEQFIDNIRAILKDRPIDYLVVDHMEPDHSSSIKTLRLLYPEMQIVGNAKTLQMLDGYYGIHTLTREVKEGESISLGQKNLSFYMAPMVHWPEVMVTYCPEHKVLFSADAFGTFGALNGGILDSQLSLDHFWDEMRRYYACIVGKYGAPVQKALQKLSGLPIETICSTHGPVWQQEIGRVIGIYDQLSRYEGEPGVVIAYGSMYGNTAQMAEKIARELTVQGVKNIIVYNLSYADISNVIRDIFKYDTLIVGSPTYNGELFPEVGSLLQKISERCIPCRKFAYFGSYTWAGAAVRLLGEFAQKMKWEAICQPTEMKQGYDDQGAQCCTALAKAIAEKIRMIKKIVLSLITVLSFCSLALAQNKQVTGTVTDEKGEPIIGATVVAEGTSAGTTTGGDGQFTLTVPANATLSISFIGYETQKVSVAGKTHIDVTLGEEATGIEDVVVIGYGTGKKIGSVIGSVDQVKSEKIENRPSTNVVDALQGQVAGLQIMTGNGELTSTSSIRIHGLGSMGADTSPLILLDGAPIQASTLQTINQNDIASVNVLKDASATSIYGSRAANGVIYVQTKTGRRNQESVDVTLTGQYSMSSAVAPELNMMSANEMLDYIGAAVAVRLSGDALTTPDKIASGRQYFIRNFGLAKFMDENYNPMNDYKWWNEILERNAPMYQVDLSVSGGSAKTSYYFSGNYANKTGILPGSELDRYNFRTNIDTRANNWLRLGLNLGLGYQHSSVADTDESMGGLYVSNPVMASLITPPYQPLYDDNGQMLNFFDATQAINPLMTADYMPRWQNRITMNGMAFIELTPVKGLTIRSSLAVDAFDWRSHGASSPETPTPSGKFGTGSARELFQRFYEWTWTNTAEYKHTWNEVHNFTALLGEETLYRNNNSFSVASIGITSSRFLNIAMGTEVSGGLPTYSIAQSASNSVFGRLEYNFAERYFISGLLRNDASSRFGENNRNALFWAVGGMWNIKNETFLRDNQTISDLSLKVSYGTQGNSGIGDYNHRQYMAAGSAYGGYTTWMVSGIGNPDLMWESQNTLTVGANIELWRKLSLSIEYYRRQTNDMLMSIPLAPSGGYSGRAGNVGGMRNSGIDLSLNYDIYASKDWFVNFHATFNYNKNQLTDLWEPGLEFVYMGNGLQAYSVGDPFPTWTMQEWRGVDPETGLDTWTTADGGITSNFNQAALVNLGTSLYAPYTGGFGVTAAWKGLSLTADFSWVHGNYALNNTMYFVANADMGLSSQFNQCDLAWDYWQQEGDQARYPRLDQAINFDSRMLEKASFLRLKYIQLAYTLPSHIMEKTKFIKGLKVWVGGRNLWTVTGYNGLDPEAAEKGVDVDTYPNTREFTFGLEFKFMKKIINSILAFVTLFSVTSCDLDMDPETAIRPEDAYTMEYCEGVRGYVYVDLKALLSGGFYSTPDLYVDVLNVCIGSGNQGIYSFNWRLYPTDQDVTSFWSSYYTTMMHINYAIRHMDAAYEYLTPDEQKKVDVYKGEMYFFRAYVMHRAALLFCEDYDPDKAADQLGLPYPKEWEPEAKLARGTLAKLYENVEADLVEAEKTVTAQGTPTDQIYLTKDAITAFRAELALHLHQYTEASQYAQSLYGTYPLVTTAEGLERMWREDTSTENILQLEVLRTTMTTVNSFGSYLNSSWEPNSGVYFYAPTYIPEQHIVKLFKDADFRTDIFLVKNANVTISGNKGVGVLIGKFRGNKNFQTNTTTLVYRNRPKMFRISQMYLVDAEAQYRLDPAKGLDPLNQLRTARGLTALTADDVKDDVTLLDGTKISGLFNAIQEERGREMLAEGTRLFDLKRWGQGFKRDINAKLAPLVDQVSYLQTMKQTAGSPKFVWPIPNSEMTQNPNFGSQNQGYLMCYERTHKYHRFPEHPGTRTTLTKISRPIKSPLITKKKQAYCIIPDYLHQTARSENPPATVYPESRIHFQTASEKRSMHAAFSAPLQEDSFTMKAGLQQIPIQGAAPRLAGNREWDGLPMPTRFWAILAVAFGVSLSVIDGAIANVALPTMARMLGISSANSIWIVNAYQLAIVVSLLSFSALGDVIGYRKIYIGGLGIFIVASLGCTLSDSLATLVTARVCQGFGAAAITSVNTTLIRLIYPRRHLGRGMGVNATVVAVSSVAGPTLASGILSIATWPWLFAINIPIGLIACLLSYRFLPKNPVRIRGRHFDWRDGLMNALTFGLLIASIEGYSHGLKPSYIGISVILLVLIGTLFVRSQLHKPYPILPFDLLRIPIFSVSVITSICSFIAQMLAMVALPFYLQKTFGYTEVHTGLILTAWPAIIMVVAPIAGLLVERIHAGAMGGVGLLIMAAGVVLLAFLPEQPHVADIVWRLLLCGLGFGLFQSPNNSILIASAPPERSGSASGMLATARLTGQTTGAALVALLFHIDPENGCHIALLLAGGFALAGSVVSFSRLSLALPQGLTRSKGKAMNATTTVLQTDSLLFRPALPDDLERICTIIRQAQAQMRLRGSRQWQNGYPAAAHITDDIDRGYGHVLCTHTGLVVAYGAVVFDGEPAYAEIDGTWLDQAPYVVLHRLAVAQEVKGQGIATEFMRRTMTLARERGTGSFRIDTNFDNRCMLRLLAKFGFVRCGEIHYAGDPRIAFQKILMKKLLLALFLVFTLPLSAEEQPAVPTADEQAAALINAQEWFRLEACYPEIRDELSPFVRLLCEASLGSHFNRLPESCNAIGTLLNDYQQELFADPEGSMLGWLLSMLIGNLQELGAYEQAADLLTQFAAGQSEEERASTLATQRWFQTMARHPRTSLTKPDGEIRLPLTVGSETVKSPLDGTDKKVHNFYTDITIGGRTERFIFDTGCSGASFVSAEFAKRHDLEIICDSISVSGIGGNGFVKFATTDSMQIGPVTIRHPYFMVFDNDEASDQIGHIEAVLGTDFMRLAGQIELRPKEGFFLLPATPEPTPASGRNLMHDTSSGQYILNTLVAGKDTVPMVFDTGNSRTGLSPNYYTLHREEIDRSGKKRETAAGGFGGILRGTGYDLKNITFTIGNGSRTLKKVTVTADFGPASEQPYFGSLGMDLFEKFDRIVFDFGRMFVTAEMLQQTIRSWIDQLLVYIGISADSARGIDQWVILAIIVAIGVGLDFLIRLLLLQVVRRVVKQTKVTWDDIIFDDKVLRRLCHIVTPILVVVMLPIAFPDQNGLVVLITRLVQIAIVIAVLRFVNSLLEAIFQLMGRREEWKGKPLKGLMQTGQVIAFLVAVILVFSILLDRSPAMFLTGLGASAAIFMLVFRDSILGFVSGIQLSANNMLKVGDWISMPKYGADGTVEEVTLNTVKVRNWDNTIVTLPPYLLVSDSFQNWEGMRSSGGRRVKRSINIDMTSIRFCTPEMLERYKRIDLLKDYIARTQQRVEEYNRQHDIPSGEDKINGLHQTNIGVFRNYLNLYLRQNERVNQNMMVLVRQLQPTEQGLPMELYFFTDTVDWVPYEGIQADVFDHVLAVIPEFDLRVFQNPSGNDLRTLTGKTDTNHMVDPTPDGLLQHKFFGSVFPRQGKVRAIVRDLHAKIVEPLPIFCKDSESREENGSLLSVFRGVSYLLQRMKPLFICYPRCSTCQKALKWLQERGIEVEVRDIVQQNPSEAELEEWIDRSGLAVNRFFNTSGLRYKALNLKEKVRTAPREELIRVLSTDGMLVKRPLLIASDKILVGFREPEWAAALSEKRMKENWKPGTLIYPLPAVLVSCGATPDEYNLLTVAWTGTVCTNPPMCYISVRPERHSYDIIRRTGEFVINLTTEELARATDWCGVRSGRDHDKFRETGLTPVPATVVKAPVVAEAPLSIECRVRQILPLGSHDLFLAEVVNIQADSRYIDSETGKLELQKARPIVYSHGEYFALGRMLGYFGWSVRRKKRIKRERQPDKMKKMLPLITLRLQNQLLVQPPFDAPQQVVEWMGAVQAQDYRMAKWAVGCRTASTDATQIEAALNRGDILRTHLLRPTWHFVSSKDLRWMLSLTADRIRAANDSYARGTDAALDSKSIHRYMNLLQKTLEGNKHRTKEEIGEALNQRGIPLSQYALRHLLMRAETDGIVCSGADKKGTATYALLDERAPHGEEPSREEALARLARIYFRSHSPATLADFTWWSGLTATEARRAVASIAEELTTEHFGDREFFVFRNAAAAAPCDTTHLLPAYDQYLIGYKDRSDVLAKEHTSKAFNSYGIFQPVILCDGQIVGNWKRTAGRGNVTIQTTLWEDTAPESLDAAVARYRLFIGGTKSENSPEALMGIGRQVDRRKVLTENRLNRIFFVLFVVIVISKREQNLSFTEMKKIYFGILCCLLGFTTSCSDDDNATALLQIDPSTDLVFEAVGGTRTIEVKTDQATWQVESNQTWCKVEKSDGTHFTVTAEENTASEPKPQAVVTVTAGTAQVVLKVDQKGTATPPLAGTTFEITLGEPTPTGVNMKVVPSDNDAVYYYDVLSKQILDQHHSGDLAVYMKNMMAEAVKNYGSVEEALKKLGSQGESNYAFEGLDPNTDYLAFAAGLDAAGEVNTKIESKTFKTKELAAGATFEVKFTCYYNGADFTITPSDLEFPYYSAIRPAFRYQGLDDDALLQTIIAEDSFMLDFMAAPGVYEYKNEGVYLPDTEYWVLIFGWAAGAPTTSIQKFPFRTSKPNIDPAACQFTVTHSDLTSRGMNISIEPSDDTVPYMFDLISEADYERYKADMKAYVTEYVGQDIDNLDNNRVCGQSGYSYTKVLEPGTKYYVWVASIDEFGKPQADVYISDPITTLPKAVSDATVTATIDKYFNGDDLYALDNEKYADCRGQAYVMVTFAAENAKEWYGTMVAEDPNDPTSAISDDEVIETLLVGGTWCPTGKLYLCKWDTEHTILAVGVAADENPGVLLRQSHTFTKAGAAPVSEFVAPESQGVRTGTMKIAPHVASVRNYKMLHRFRHSIASFSLPTRLNNPFHYTPHPLCELAARELRAYLCERKEWTEELSAGKMFGVLVVKDPAGTVGFLAAFSGNLAGSNSHEYFVPPIYDMLRPGDFFRTEEASISDLNRQIETLETAGRYRELLRTIEETETEVAREIAAAKARMRIAKTAREARRREHPDENTQTALVRESQYEKAELHRLKQSWKNRLASLHAQRTSIAERIESLRCERKARSAALQAKLFRKFRLLNALGEIRDLAEIFAPTPQGTPPAGAGECAAPKLLQYAFEHRLTPLAIAEFWWGASPKGEIRRHGHYYPACRGKCGPILAHMLRGLDVEPEPDRACPQSAPELLYEDRWIAAVFKPAGMLSVPGKSEAPSVLDWARERYPAATGPLVVHRLDMDTSGVLLLALTKEAHQDLQAQFKHRTVRKRYIALLEGRITPPKGRIELPLRPDLHDRPRQAVDPLHGKPAITEYEVLEFRNGRTRIAFYPLTGRTHQLRVHAAHPSGLNAPIAGDRLYGTAGRRLLLHAERIEFRHPATGDRIAIEKPADFMIIFASEQIAASMKKRWIVFTVLLIVALTAFLYIRFFFVFGEGVKSGELNYVVYKGLVFKTYEGKLIQSGIRSKTAGTIQSYEFEFSVENEALARKLMLLGGKNIELHYKEYFGALPWRGFSKFVVDSIVTKPIGSLPIDSETERMMNKENQIILYQDDNEITRVSVRFADEDLWLTQGQLVEIYQTSKSNVSEHIKHIFEDGELAKEATVRKFRTVQIEGSRKVEREVEHYNLDMIIALGYRVQSQVATRFRRWATQRLHEYIQKGFAMDDERLKQGGNRYFRELLQRIRDIRSSERNFYQQVTDIYATATDYDPRDEMTKMFFATVQNKLHYAVHENTAAEVIYNRVDNEKPFVGMTNFKGNYVTKDDVKIAKNYLTAIELQRLNLLVSGFLDFAEFQALEMNPMTMKDWIEALDSQIIAHKRKVLIGKGNISHKQAIEKAEKEFAIYRKREMELLESDFDKEIKRLKNKNDNSSNMQFECGNIFAKMNNSAFIVEDKIHALYEEGKLYFQSYTVANQIFSLIDFVTEATNAEIESFGEIDGINVNTESIKHIANIKTRRLIKLLSNTDNISAFMRKAPRTKTSLLNKYGVNAQINENKELVLPTNNVADLNRVLEFLNEDIFRGVITDRLYRSNSKKKDNHMSQFYALMSDNTVKHISLKEEIVTEIKNIFINGGAIFKPEGIEEDVFDGNIISRNGENITYVHYDLPEDFARIPYNQADMSEYNINEDMPKSIFYYDDGKFYFQVFNKTCYNEKWSCSLNVEIYLQKMVSFISKFLFTATVTAPTFLSLGLIGVIKDSTNYFQLWDDMLENKIFPTSFEWWGINISFGFMLICLIGIKIFLYRKSNKHKEGKTIQVKSYSNLSLNSAEQIISSIIPWLTIFADKLDFMVLFVCIILQCCFIAIASYNNNNYNLLCSIWGYRYYEVYTEENTYILISGKCIRNKNEIKKFIEVTDYMGLIINEKMLQQFIVENFLSFRNRETFSLLPNKGTLKKEHKTEPIKGQWVLKSAAMFGANAGGKSNFVKAIELGKRLVLRGTRTDDLIDFYPFRLSSENKKRDTTIIYHILCGNKKYEYGFSYNSEQISSEWLKQINKNSDCVIFQRETKKSEFEISYLLKLNPKEEESQFLSFLAKATPQKQLFLHEVMSRNIHENVSNIKDLDAVIDWFVNSLKIIFPDTPYKQGVLLKAADDNDLKRGFGALLRYFNTGVDGVKLIDVQFEKLGIPHDLQRAIKTDLSKSNTDEAFGALRFDDNLYLINLIDGEIRAKKLMTVHKKMDEADIELFSLGDESDGTKRLFDYIPLILDLIQGGKVFIVDEMERSLHPSLIKQIILLFYKHSKDVSSQLIFTTHESSLMDQKIFRRDEIWLMKKDNNGISSFGRMDNLYNVRFDKMLQNSYLNGEYGATPIFETEEEINKLFSSLKMAKKYNKPIIAVQPWGAERTSSIVKNAADVIVGWNAKSVANAVRNYAIYQSLMKKALLIGINDYPEGNELTGCIEDINSVKAAIERHGDGSPNFGVKMMPNVQTSGEVMDAIRKLFAGNDDTALFYFSGHGYMNSTGAEIVMPQDIATPGQYYTGIQMSTIMSIVNTSKVRNKIIILDCCHSGNIGKYELQDVGSILNTGVSVLTACREDEVAMEAGGHGLFTELLCTALNGGASDYCGNITIGGVYAYIDRSFGPWDQRPVFKTNVTEFAPLRTVTPQVSLSIIRELTNLFTNPNNDLALDPSFEDTNDPSVNHEYILPYADANNVRKFKLLQKLQSIGFVKPINEEFIVPDVSMKGIYQTVYIEMLLEDYRYMYVARKGECYMLCYENTPRMNVVKGIYYTLSKMGLQVYLDCIVDVDLKRNETNKDTAKRLQKRLMSSKSLIYAQSPEAGRSNWMPWELGVVDGHTGKCMIMPVTKDAQHASPQREYLLLYPYIMPYGIEGQMRVFTESYPYSGEDLSSYIRKMDAKYDNIKTAPTIISHTETGVYASQRSLAQNTSDIFIRDGRSISIITKVTEQSSEYIQSFVSPLRPFGLRGYFVSDPNFHETSDGLTTPVVCIGKGLKKGYVERNLVPLHTNWIDRFKVIIPRANNIGTEANDDNLNAFVGKPNEICTESYLCIFADSNVSYDECVNICLYLKSRFARFMHCQAKSSQDATAKTFRFVPTQDFSKESDIDWSLSSVQIDKQLYVKYNLTDEEISFIESMIKPMMKFTSSLKLKLIYVFRINDAAHKGCLKVGEATCDNDNVFGLAPNSKALNESAKKRINQYTQTAGIAYDLLYTELTIYNSKYGLCSFNDKEVHSVLERSGIKKKIFDTENKANEWFITDLETVKRAIIAVKEGRESLSSAEVSHDKSPIVFRPEQREAIEKTKKQFKKGNQMLWNAKMRFGKTLSALQEVKDMDFSRTLILTHRPVVDSGWFEDFGKIFYDRRDFAYGSKNNGDSHTSLETRAKQGQCKYVYFASMQDLRGSELVGGNFDKNNEVFATAWDCIIVDEAHEGTQTDLGKAVMQELTKDKTKILRLSGTPFNLLDDFKEDEIYTWDYVMEQRAKASWDELHFGDPNPYASLPTMNIYTYDLGRLLNEFVDEDVAFNFREFFRVNDNGTFVHDKDVSAFLNLITKEDRESCYPFANEEYRNIFRHTLWMLPGVKEARAMSAMLQTHSVFQHFKVVNVAGNGDEDEESKDALVAVEEAIGKDPDATRTITLSCGRLTTGVSVKAWTAVFMLSGSYNTAASSYMQTIFRVQTPAAINGKVKEQCYVFDFAPDRTLKVIAETAKISSKTGKTSGNDRKIMGEFLNFCPIISIEGSKMNQFDVPRMLEQLKKVYVERVVRNGFEDRSLYNDELMKLNDLELQEFDDLKKIIGQTKAMPKTNQVDINNQGLTDEQYEELESLEKKSKKKGKDKQPLTEEEKQRLEELKKKKNNREAAISILRGISIRMPLLIYGAELKDESQEITIDNFASLIDPQSWEEFMPKGVTKQKFNNIKKYYDPEIFCAAGKRIRAMARAADKLSVEERIERITDIFSTFRNPDKETVLTPWRVVNMHLGDCLGGYNFFEQGYETTLSEPRFIDKGEVTANVFAEDSRILEINSKSGLYPLYMAYSIYRTRVKNSLFSVSSIEDEQQIWDKVVAENIFVICKTPMAKSITKRTLIGFRKAKVNTRYFEDLINQIKNKPEHFIKQVDKFVSERTGIKNMKFNAIVGNPPYQVMDGGAQASSVPVYQYFVSIAKKVQPNFISMIMPARWYAGGRGLDDFRADMLSDKTIRSLHDYPKASDLFSNVGSKVDYAISMPVEVDILEDSIFQFSPELLNTLLKDHTTSRDEMQRNIFWATSDYEHLGKEYQYNSPILPHLITGDNGHIIMPRVLKSRDTQSTRSRDMAEVFTPSWICNAQNNLIDEAWFGRKDVFNTEYADEQGHHKWKTTEGCIIFPEGKSWKDYVRDIRLEITCGEAPYLISRYDTTTGETIPLEQRIGLLDRKLRVVSENTSTSGEWLEWAQEAYKSTYGYEWQGDNLLIARESMLVSFVEYFQQKFGKCPLLKSINYIAYIISWNVWQMDGLRGVIPNSCGERREVVADLFGTTEVVTQCEGCLKDDIRRHNGVYCQIKDWHATDKATGKKGKRIRFIDLIKMASVKVKFRPSTVNGKEGTLYYQVIHNRVVRQINTEYKLFVSEWDSHSETVVLHHLLTGQERNNYLLSIGSRIKWDKDRLNKIIHKLFQSGTFVTDDVVMRFHENRQELSFNAYISQQIARLKRLGKIRTSETYTAALRSFNGFINGKDVLFDQLNADLLAEYEAYLKGRGNTPNTISFYMRILKAVYNRAVEDGLTEQRHPFKSVYTGVEKTMKRALSLNDIRRIKGLDLSLKPNLDYARDMFLFCFYTRGMSFIDMAYLRKKDLQNGTLSYRRRKTGQQLFIRWEKCMQEILDKYPVNETEYLLPIITKRDEDYRKQYANELHRVNHLLKKIGKQLDLPIPLTMYVGRHSWASIAKSRNVPISVISEGMGHDSENTTQIYLASLDTTVVDKANKRILDLLMKKKSKYGRNPKLNPKTHCVMVRFDDEEWNKFLTMYEESEVYAKAVFLKAHFFGQKFKVLKVDKTMVDYTTKLSDFHAQFRAIGTNYNQVVKELRCHFSEKKAMALLYKLESCTIDLVKLSREIVELSREMYAKWEQSKSDMNYSKDGITVAPIIDTSHPKKNGKCPVKIRVTYRRDRRYYPTGKDLTLDEWEGLTTTKVRALVAVRKDIESSYQIVRGVVEELARDGIFSFDSLNKRLKRSGVDTLNRAFAAKIAELKEQDRIGSMLVYNVVIQGLERFAGDRIALESITVDWVRRYERFLLGEGKSRTTIGIHMRHLRAILNDACRCDAIKPAQYPFGRGKYEIQAGEGRKLALTLEQIGQIARYEDGNEATAKYRDYWLFLYLCNGINVADFVKLRYRDIVDGEICFVRQKTERTTKTRKEIRVAVVPQMQAIIDRWGNTPAPNNFIFPILDGSEDAVQSHAKTIAATGLINKRMRMIGEQLEIGNISTYTARHSFATVLKRAGANIAYILESLGHQDLKTTENYLASFEREEREKNAALLTNFMPGLNLKAAQWEQQHKTHVEEYLRQIEALYDVASDELIRLGMGYKYQPNTGRLFAFSSNKSRSKQADASLSSFRNKLSTIITAGITSEWFFANDKNDSWVKQLFDNPKKGWMLHNLGALEAFQRRTTYGHNLSERVWSIAKQFERHIELSLSIGISEGRSAADISRDVRVYLNEPDKLFRRVRNAFGNLTLSKVAQAYHPGQGVYRSSYQNAMRMARTEINSAYREADSIRWQQLDFIVGYEVKTSKSHVQWLAKFWYPRFKKGRAPLEICDAMEGKYPKSFKFIGWHPNCKCYAVPIIANEGTDRDFWEEPLNEVKDVPDNFKRWVEDNTERIEKAKNLPYFIGENKKHFNDSLFINRDAVMGFIDNLLNAIRNKYLNATGAERDLLTLIKDKDITQAQTLMQNRDTEVLQAIQEYNPELHRIMRKADKMRKGQEPYRTEKLPRARQKYINEVELFFLLGNPIRWKKVNNEGSDEAFEAYNQFLQDTRFNVSMRKAKRIAGAETECAKLYHIYRDENFQPQVKVVVICKSKGYTLRPLFDLYENLIAFGYGYYLKEGTSTIEHFDIQTPDTIYRCKRGSLNWEVIATPNPTGKINVIYYRQDKAWGGLNPRIDREEDIDSKISDTNNYFADPIAAATGDVVDFLKGRADKPGKMIRMTGADSKFEYINPPTSSETQQREKEDLAQSILFDTFTPEFTPEKMAGLGTLSGEAIKRAMVLGYIKRENNKEIYDIAVDREKNLILAIMMNVTHIHLRPDLAALKIEHEFAEPFNEDVTARWAAIGRAVQDGVMSLEKGVELMGTADDVTAEIERIKQAKAEASMNNIIEPTFMLNFTRYMFKHKTGMRFIVGDHHRKICEALDKVVRGEIKRLIINIAPRYGKTELVSKNFIAYGLALNPRSKFIHLSYSDDLVLDNSKEINETVQSDYYQRLFPEVVVESKNAKKWYTSVGGGLYAVSAAGQVTGFGAGQVNDPYRERREMGDFIPAWESDFAGAIVIDDPIKPEDALSETIRERVNNRFESTIRNRVNSRNTPIIIIMQRLHEHDLCGYLQEIEPEEWTVLSLPCIWHDENGQEQPLWEFKHTLEELHKIERSNSFVFETQYMQNPKPLEGLMYGEFKTYDIIPYAASMKRKNYTDTADTGSDYLCSICYTETPIGNFVTDILYTQKPMEYTEPATAEMLSRNKTEICYVESNNGGRSFGRNVEAQCRIIGNNFTSFNPFTQTANKRVRIFTRSNEVQNLIYFPTGWEHKWPEFASHVKSYRKQQEFNSHDDAEDALTGVIEKRGYFNNEEDLDKEDLGIWMAMPSKKPKLDTFRKVANACGGILSDIAANLGVERSTIYTWCNDDEQFAQALEDSRERFVDLAESNLRKLVAGVPAIEKDENGEKRFAGWIERPSETAIIFTLKTRGKKRGYVERQEVTGADGAELIPPRTLSPEEARQYGLKLNEEYMTKRKEQQPKYKQSETVVIKRSQINFAPYNPRKEDPEVIKKLKKNFKTVGYLGGIVWNQLSSYLVSGHKRVQTLDIINNYDGTPETDYEIKVEAVELDDKTEREQNIFMNSPSAMGEFDMEKIKVLVPEIDYKAAGLSEADMNIYGISVMQDEISSELSDTLGDFEEIQRPFEERKAAVKEMKEQIRQQAEQKAEDIESYVMLNFKSYRAKSSFMLRFGFRPDDKIIPGEMFSDMVERVEMTPIDHANEVIASVRQKTDRAILFYSCGKDSEVLLDLMAPHFKEIVCVFMYFVKGLDHIDNYLRAVKARYANVTILQVPHWTLTRVLRCGLYCIPNPNVKLLSLKDVDESVRMKTGISYSFYGMKQSDGMNRCLMLRGYENEAISNTNKVYPLSKWKKSDVMAYIKAKKLPEPISYNKNKSQGLTFLPEVFDYLRRHYPQDLEKIYKVFPLSRNILLRYDEEKRAAAQIQAKMKILTLIIKQKWFDAILSGEKTVETREVRPTNTKYISYRDNNTGKVYKKDSDVPESAWDSEKGVDTVINHYDAIQFWVGYEKNRPGALVEVKGVELVDVCDEETKEPIVYEHNGNEYTMTEIDYHLGKVIEKMNCMKPTMYVEKRSDLTLLKKAFELTDATCHRTRLKCGCKAYKGADNNRDSLLIVKYDAVVLEIIRCKGCVKKRPMKRTDLSIIMRTAWQMCRATGVTFAECLHKAWQVFKLKIKMRAGIVQFFYLKSSTGELRQAFGTLKDDLCPETKGDDRKPNKHLVTYYDTVAEGWRSFRMFNFVKVIMKTRKSFKVNREAAIKIAMNTNGISREIAKKYTDSELKECLRLLKLKTNFMKDIKIGDPVRFGRNTGEYRGQFDKLNIAMVLVGNRLYYVTFEKIEKLMNAFAFKVIDAINRDGMDNGSWGLVKDVDNTVAYFGTREEIELKGQWAYIYAEKDDTLSLQLEKIEPTRVLHVEDCELLLYYLDEMKLLTKAIEKQLAKYPIYSQDGKGGKAQVICKFFNPCGSQTWYILEGEKQDDDYILFALLDNMGEREYGYVSLNELQRVRTRPFGLGIERDMYFTPCKVSEINMRVKELLKERGMTAKELAARLGMTETGLSIAIGDNGNPPLKRLQEIADILGVEVPELFAASKEGAITCPHCGKSITIKAEMELQPIQSKIYEIRGQRVMLDRDLAELYQVTTSALNQAVKRNIERFPPDFMFQLTDAETENWKSQIVITNSITMGLRRNPYAFTEQGVSMLSAVLKSSVAIQVSIAIMRAFVAMRNYITTTTTVTAELAEIRAKLALLERVDADNAEAVSDLSEDMRKELDNIYNAIAALSVKIPQARKPARKIGFQQAEQKAEEMTQKQAIQLFEDRKVRTVWDERTETWYFSVLDVISALTDTVNPTDYFKKMRKRDEALASFVGTNCPQIAMRSETGVMRKTLAGDVKTVLRIIQSIPSQKAEPFKQWMAQVASDRLDQMQDPELSIEQAVADYKRLGYSDTWINQRLKSIEVRKLLTDEWKRGGVDGTQYATLTDIITKEWAGRTTKAYKRYKGLKKENLRDNMTNVELLLNSLAEASATELSRNENPIGFKANANVAKRGGTVAKVARQQLESQLGHSVVSPLNARQYLGTLPDNPPPETAHLTSAVKSTKPITCDTSNEEEMEKCGFEKEFSDCYQRFDYYIIPRVICLSPKKEGFCWQVEDEIDDCNVDVPIKYLHQLQNIYFTLTGTELNVEKIYDARMMGRIEAAINPMYCVPKRSDLSLIGSAFEAAGFRCVRIRTECEAEHRTKGGDPRRHGMLVLDGDRVILEVLRSRPTKKDNQLTIPPQSMAVICAVTFMGCEKDEQESFKFDIENLYGTWQGIAIQSNGEWIDITQPPHTNLAFSVVFYENGTYSGSGYFGNGSGTYKAEGDMIYTYIDGEELYRYKVHSISNGIAEVSMGVAGDNITLEIKLQKKMIWIYILLFVIIALIVYLIYLVRFWGRTNIELTGDTYTGLNNVLCRILNQDRLKKMNLMIAKLQKGDINIADVFLNELSRNPAYFNMDAVKTLIPNEEQRMRILRVLEDHMVIEIKXXXXHMHLETLLRKEDVKVADKLMEDLNVRYDRLFASISGVSTGFPAAPTDLGVKNPPPHKIGAKIMYINELQKYIVIQTPDNKHSKKSMHFNGGKKYVETFDEEKKGTKHLITALTDIYKLSDQLISTVKFYLKMKKEEVGRLTEQRALDTLTEKIESFEIEGNDKEQITLYLYPLQLGRLAMISRRLIDLDLIFDDEQMEGAVKRMWTICSEKSKEVAEIIAIATLRTQQEIEDMLKERTKLIYWSPTMDTTALTNILSTIVFQSYYADFMNAIRLVRTLRVMISPTTTAERIATTEGAVSGLAFQRREKVCMGQIIGLKAVHAGNPLPKGVKDAEAADLMKAFTKISQPYNGGVSTNFAIPSSNDFYREGEADPFYSAIDETTGTKEVTWNVVDFDDDTMEFYFGTTEPAKGEIYEGVKAFVFDSKSGGSIAFARLKYVATLGGGINKTDPLQIQVSAKVLAPEQGGYSWWPITTPEYTKGVLMNLTSTEIFKLVWDRIRDSLLGKTVPMMYADHYPNNPSGEFIVVGSLSNVVGDSQVATVNVNIYVPDTTPTIGREEQRYPDRNRLNELTRLAFDSLGYYPINERWFFDVSDETLISEEGISYTFSNLKVKLKKYMAVKCTNWREVELEFARAKEEYDRKAVEWLSALGERVVKYAREHGSYTDHTGNLRNSIGYVVVQYGRIIAESFKYNRRVRPDGNPKGNKGADEAHAKGLEHARSVARELPANKTYLVWVAGMEYAKYVEAKGFDVLEGSGNWVESTAEKLKAEFARFLKSKKRMVRFPYTLEMWYEEDASQNPDGSWIEGAHEWRVIGRCNARQNGRAQQIKGQNGDAFLYSFEVTMPADTQPIPIGTKVRIFDSRGFNIFDRSLRTEAKPKDKDTASYPVQGFYKSGQRYENTRLWLMKNFEAISASLYPYDVDPFLKEKACIDEGIDTQADYTVTDKISVAKATIAILRNLIVLASESNGGYSLSYTDKLEKRIFHIAKENGLDDIAEEFDTRSKITDISDQWMNEVFYSSIFGELTKQVQIRIDAASELRKRLFDQNIYERFLDWDTPTVGLNFEELIGSYNLSVAAATLDSKGKEPIMGTEGLETIKQKVLTHQMSYSMPIEEYRKVLQILDSRMLSDSAKTQQLINLMWNNVTKVVNSVQSKLDIIFLGALSNKGVFTFDASNNPEGGVRGTIDYKMPSENIATAKTLWTDGNKDTVDTLEDIQAILDAAQDKVTFDRILLSQKRLSYILRNKKMKLAVFGSDKSSTPLLLANLNEFMRSNGFPTFEVIRRMTRIQDNGKLTEYSPWNDKNLVFVPAGKLGVIKNAYADNELRQEPGVTYSNYGRIRISQWGKGETDNSNGVEFTKAQSLSLPVITEINGIYSLTVESMAIVFEKTKVKGGFPIFWRGEFAVLPGDFKLKGTYPEGTKIPKGTPIKLDFDNMECSICKSARVLSGGTTTAPHVKKGSMLQVGDAVKVGESNSTVKSIDTKNADYDVITFAAAVTGATEGVDVLSDDNLPDAVVETDMVYSANNGFQTVSAGYAGIILKDVAYPVPAAWLQGYSLKNNPEIKYVRQMKEKILVALKTKYSNLGFGAKALDGVASILEKSVTDESQIETAVSGVEPFLKVFQSDADRARTEYNALKGLYDELKAKSEASPANGGGQGKKNEPDDEEPAWFKAYKKQQEERYNAIKAESDTLKAEKAKNDRANLISAKAKELGIPEWRMKEGFVIADDADEKTIGDYLANVQKNLVTAELEGKGSGFPMSTPEAQGKELAKAWAETLPDKEMKVISFCNWWAATSQPLRQKSVCSAHYANYFKEKFVKKRGEQFSLSENSFIEMIHSKKCEKMGFESWCKDRYYFLKTKKTTEYFPSQTFISGTAGRNIGKFFRPGYRKFRILVIFVKTVKIMKTSSLMMCALVALTACGTGVKQSVRTPVEMGERIELKTPDPKMGLTINEALAARSSSRDFSPEMLSLEELSGVLWAAAGVNREDGHLTAPSAMALYPIRVYAFLPEGVYRYDSKANVLNRVIEGDRRELTAMQDFAYTAPLNLVYVADYSVYADRNQPVDRIRFWCAADAGGYTENVNLYAAGNGLKAITRGSFKEEALLELLGLDPAQYGVILAQTVGRMAGSIFGKSIDEEFPETGGSSLRFVRSGQTAGPVPGGFFGRTVLSSLFPDKMQKQIFIAFCRGEVSKTKSKITNKPNAKANFYCVLPRRSIQNEVKDSEIPLSFVRKKRRMLSKPEREQIIALIKREVVPAIGCTEPIAVALCVAKAREILGTEPEKVSARLSANILKNAMGVGIPGTGMIGLPIAIALGALVGRSEYQLEVLKDSDAKAVERGKRFIEQGRIDISLKEGITEKLYIEIEVSGGGHSAVAIIAGGHTNFVFISRDGETLQESRRTSGSEQEAQGVELNLRKVFDFAMTTPLDEIRFILEAKRLNKAAAEDSFKNNYGHCVGNTLRHAPELRIIGDCALSRILSYTCAACDARMAGAMVPVMSNSGSGNQGIATTLPVVVYAEEIKADEEHLVRALVLSHLTAIYIKQSLGRLSALCGCVVAATGSSCGITYLMGGGYEAVSFAVKNMIANLTGMMCDGAKPSCSLKLMTGVSTAVLSAMLAMENHSVSSVEGIIDDDVDKSIRNLTLIGRDGMNETDHLILKIMTSKMWIYNLGLVLYVWAIALASPWHRKAKLWIDGRKGLFRRMKESIDPSARIIWIHAASLGEFEQGRPLIEKIRKEHPEYKILLTFFSPSGYEIRKNYDQADYIFYLPIDTPRKARRFLDIAHPEIAIFVKYEFWINLLTELRRRSIRSYIVSAIFRRNSIFFRPYGGYWRMALESFDTIFVQNNDSKKLLAELGFDNVVVAGDTRFDRVAEIAAAAKKIDLIERFKGGTRLLIAGSTWGPDEDLLIRLINDNPSVKFIVAPHEMDESRINRLLAETLGGAVRYTQCTAETSFDGKQLLVLDTVGILSSAYGYAEWGYIGGGFGVGIHNTLEAATFGLPIAFGPNYEKFKEARDLVTLGAATPIHSYEELKTWFTPLRDDEHLLQQCSRIAKDYTTAHQGATNIVLHTVFGKPEMTTTQHTGRLGEETAARWLLDHGFTLLHRNWRQGHYELDIVAARKGTLHFIEVKTRRRDGLTPPEQALDSHKRRALVRAANAYLTENPFAGEVQFDLIAVETAPAGTPEVRYIEDAIELHWMLNLDRCRLDIRLHDKIPFTEKADRVIFRGSVKSSEQRRRFIETFRDNPRIDTADTRSGHSAQETGTAKQITLYAHLDSKFIMTFEGNDIASNIRWVMSTNSIAVMPRPRNESWFMEGRLRPGYHYIEVRDDYSDLEEKIDYYIAHPEQAQQIIDHANDFARQFYDSRRERFISLLVMKKYFEKTGQLSPTNRMELMTALNRLHGGKNIKLPYFIAQLSRYAVPKVLLRSRLEEILRDGEKRYDMDYVLDRVNYYNRLTGAERLSPTEATPLKEHKFRGRHSAYIFDSYQTTRFFDDSLRWQTYFGDGVFDLLHPTIIKARKIDRGGEKPLPAKEITPYCSTWTAAAMKLLLISNSTNAGEPYLKYPMPRIDEFLGSVREVVFVPYAGITFSYAEYEAKVQARFAEYGIKVRSVHRSKDPRRMIREAQAICVGGGNTFALTKKMQEQGLLKAILGKIKAGTPYIGWSAGSNVCCPTICTTNDMPIVEPESFKAIGAVKFQINPHYLDANPEGHAGETREQRILEYITANPRRYVVGLREGCMLHYENGKLELIGSRPMRIFKKGIAPYEVKAGDDLSFLLMSEVQSKVVEIIVDKLGVKESEVTPEASFTNHLGADSLDTVELIMEFEKAFDIQIPDEDAEKIATVGDAISYIEAHKKMTERRVVVTGIGTINPLGNNIAEFFSNLEKGVSGAAPITHFDAEKFKTKFACEVKNYDWTQHFDRKEVRKYDLFTQYALIAATQAVEDSGLDLEKEDLEQIGVIWSSGIGGLKTFFDECLGYAAGDGTPRFSPFFIPRMIADIAAGYISIKYGFMGPNYCTVSACASSNHGLIDSFNAIRFGVADVMVAGGSEAAVNEPSVGGFNSMQALSTRNDDPVHASRPFDKDRDGFVIGEGAGALILEEYEHAKARGAKIYCEMVGGGRSADAYHFTAPHPEGKGAMKSMRDAIKDAGIKPEDIDYVNVHGTSTPAGDLPELKALHGVLGDHIYDVNISSTKSMTGHLLGAAGAVEALACIFAINNGVIPPTINNENLDPEIDPRLNLTLNKAQKRDVKCAMSNTFGFGGHNSTVIFRKIMWNFVRRAVRRNYGQDKEYYRIIDELFGFVPHNIELYKLALIHKSASLVLADGRQINNERLEFLGDAVIEAVTSDYLYIEFPDRQEGFLTQLRSKIVSRQSLNTIARTIGLDRYVIANPTGSTNQKHIYGDAFEAMIGAIYLDQGYEFANRLLINNIYYRYLNLDNLTDEETDFKSRLIEWCQKTHHTIAFETVHGRNYSSNHPIFDATVVIDGIRVGHGQGESKKEAEQCAAHSVSCAMSDEACGDILDKIDRLYQPKGTGVSMSEASVKLLSRGVETLTDQELLELLLDDGDSERLAGALLSSFEGRLAALGYADIARLRMAAGIGLKRAARIQAAVELGRRVLAARELGPDPIGSSNDVVRIFRPLLTEMKHEECWCLYLNTGNRIVERQRVSQGGVQATVVDHRLVIKRALELLATQIILVHNHPSGAALPSEQDKILTKKIAEAAALFDIRLLDHLIIARGGEYSFRQNGLLQMKGLKLLLLTFATLAITACSDDTTDEWHGDFGSIQVPDTRQLSQKIPAGQTAGNSEIFFSTNDAWNSAITDESRAEAPTWVRINPDHGDAAGDYDIRVETDPNTAEESRTAFIEITCGTNSILITITQSGTDGEDTNEPDEPNIGEQVRYWQLHKIVGRDASGSLIAEMEYTYELPAEFSKECRITGFKISAADKNGTLRPVETWQFTYEGDDCIRFSFTREIDGEQPYTQTADGTLYGYFCDVRSGGYELTSTLSGSEIETYGFDCTYGTGTFNSDKLTSISRYNSLTLEPICEKYEWEKDPWGPLEAWDNCSAVIRTLENEPNTETFRQEYGYDYDETTAWSDFIYELEGTPLLNSDPVLLLVAEPDILRGLGFFSSLNNDLFRTVTTRSDDAVTTQTFEYTRQTVAHDAEIATPLIITRTTRSDERESVCRFEIQFRRFDLQNMYFLMVIRSGTMNMKQMYLSSAPDISEFWRKDRKNGSEYLTFPFILYFCFSENSKCKIRMTQEELFKKLVAHCKEYGFIFPSSEIYDGLGAVYDYGQNGVELKNNIKRYWWDSMVRLHENIVGLDSAIFMHPRTWEASGHVGAFNDPLIDNKDSKKRYRADVLIEEWLAKQDDKIQKEVDKAKKRFKENFNEEQYRSTSPRVLEIAAARDSVHKRFADALNANDLEELRRIILDCEIVCPISGTRNWTEVRQFNLMFSTQMGSTAEGANTIYLRPETAQGIFVNFLNVQKTGRMKLPFGIAQIGKAFRNEIVARQFIFRMREFEQMEMQFFVRPGEEMRWWAEWRDTRMKWHRALGFGADNYRFHDHDKLAHYANAATDIEYNFPFGFKEVEGIHSRTDFDLSNHQKFSGKKIQYFDSETGESYVPYVVETSIGVDRMFLQVMSAAYTEEKLENGEERVVLRIPAALAPTKVAVLPLVKKDGMPEVAQRIVDLLKYDFNVVYDEKDSVGKRYRRQDAIGTPLCVTVDGQTLEDNTVTVRHRDTMQQERVAIDALFGLVDAECSLRSLLKKLNVMSDRAVAGFAPGASDGEYSVLCIGDVREGVWAGVVRAIGMGRILAIDYGTKRTGIAVSDPLRIIAGGLETVETKGLERWLAQYFAANDVSTIVIGKPMQMSGAPSETWRYVEPLAARLRRAYPDKEVVFYDERFTSVIAHRTMLESGMGKMARRDKALVDKISATIILQGYMESRSMIYPIVVFGAPVLREKCREIGPDYPEVKKLIEDMFLTLEEAEGVGLAAPQIGKSIRLFIVDCTPWGEDHPELADYRRAFINPEIYEVSEETKLYEEGCLSLPGLHESVRRSLAIRMRYLDENFEPHDEEFTGLPAWVIQHEYDHLEGVVFTDRLSPLRRNLIKSKLMSLTKGRYKCSYKTKMKKLLLTLAMGLLAWSASAQNWTVGGRIGSGFQAVGQYVFSNDNYVEARFGAYWANAGGTVTADFSVLYNWNVCNMDWTPSAGRWFFDAGAGINVGGKGHYAYVGVAGSAKLGIAFKGAPVRLSFDWSPAFGPGIAYWDGGSHSEFNERALCNFGITCVYCFMKKTLLAILILFSAFYASAQDRGSWGIGPKINLYTHTGRGAVFGIGGYFRYSLTDALRLETGIVIPCKSECSVDIGCDAHYLFHITEQWSLFPTVGVNVNDLGKWSCGFDVGGGCDYRITRRWSTSLMFKYRFQTAMFARNPILISLGGTFTFMGINILQTIPPNVSIMKRLLFGILATLPLAYCMTGCSNDTDYGGFSYFIWANDSDHRITLSVAREYGELVIENEIIEPGESFESERVDGAIAYCPPPSSYIRYVEVVFEDGTKAIYIKGYQPPRDSDYYSRQDSTIDWNYEEEVTASHAVRTRWTYTFTNADYDAAVAQQFAEMADVKRVYTFGNKEAEGNGKMRELLGGKGANLAEMNLIGIPVPPGFTITTEVCSEYYAQGREKVVGLLRPEVEKAMKNIEKLTGMKFGDKEMPLLVSVRSGARASMPGMMDTILNLGMNDQAVEAVAKRTGNPRFAWDSYRRFVQMYGDVVLGMKPASKEEHDPFEELIDAQKEKRGVKNDTDLTTDDLKELVHNFKAAVKKQTGEDFPANPWDQLWGAICAVFGSWMNERAILYRKLNNIPAEWGTAVSVQAMVFGNMGDNSATGVAFSRDAATGENLFNGEYLINAQGEDVVAGIRTPQQITIEGSRRWAKAQNVSEAERRSKYPSLEEVMPAVYKELNEIQHHLEQYFKDMQDIEFTIQDGKLWMLQCRNGKRTGAAMVKIAMDMLREGLIDEKTAVLRCEPAKLDELLHPVFDKTAMKNAKVIVKGLPASPGAATGPVVFFAEDAEKMLKEKNQRAILVRIETSPEDLKGMLDAAGILTARGGMTSHAAVVARGMGKCCVSGAGELQIDYKTRTIRVNGYEIKEGDWISLNGSTGEVYLGQVATQAADLSGDFGQLMELARKYSVLKVRANADTPKDAAQAFMFGAEGIGLCRTEHMFFEGDRIKAVREMILADDEAGRRVALAKLLPMQRSDFEGLFKAMQGHPVTVRLLDPPLHEFVPHFEKEQRELAKDMNVPYEKIAAKVELLAEVNPMLGHRGCRLGNTYPEITEMQTRAIIEAAMNVKKTGIPVHVEIMVPLVGNHKELRYQKNIIDQTAEKVFSERNDRLEYMVGTMIEVPRAAVTAHQIAEVAEFFSFGTNDLTQMTLGFSRDDIAKFLPIYLEKGILKNDPFQILDRNGVGQLIREAVFKGRGTRENLKCGICGEHGGEPSSVEFCHFAGLNYVSCSPFRVPIARLAAAHAALKEAMLIIIVFFPINVLFQSCFRRAAGEAFHWEGNGEKTVFSGGAKIRMKRISFLAIFFVIASLGAIHAQQRTGFAYYDLDRLYDTIPSLFYDDTDYTPEGRLRWSGERYRAKVERAGAVIGRMAMPLAGVYGVENEEVVKDLVRASDLPYSYVHRTLNTLDGMDFALLYYADRFFTERIETGYGYLCVEGTLDGKPTAVLLTRGDRYAAELLEELRERTPGIRILCAGKLPSGTAEKLSLRDALAPAERRGRGNAYARGGWWLHDRILTDTALTVIRADVFARRDLLDPRSGTPLPTYRRQRYTGGIGRYFPIFLYIKMVKATVRIFKNHGFKQINRNIEELKFTLLNYNTVSFLRKVGQEKPQRQRIMTKHTIIFMTLFICSSCRSLQGTVFCIDRQSDNLNNRLKLSDYTLDRAGNSMITDRDTVYRLALLLGNDTTGYGNWKQYYRIPFDGNRTMRLVLDGGDDPGPREYLILHDEHGKIVRYIEVAAEYGDGPRSKKIYSVLTKDSLYVYTVTTEAFLTGDDFIDDTKPATADTMKKSYHIGDLTAIYRMIIPSIFRALRLVRTVYAGRFCIPVLPKHTLTFTDRGDVASVKIICIMIIGYLRVSMGKQHLANQQDEIRRFAESRNLVVDHLLRKMKHLFVNLFSLVCMLLAGVGLTGCTDDKTEPDPGTWPSLEVKFLEAQYSTVKLEVTAANLTEIAYLATPKADAKETPTATIVFATGVKSAIADGVSSLTVSKLDPDTEYVIYVAATTANEEFFEKVLEVEAKTASFGDNAYDVFDVDYMSFSMNVKFQPTDPENVIKYLLIDMLTYNYQSMMNYTDADMMNLFDDIYHNYITEDTVFVFNEENSILRNENGEPVTDEEGSMITLWNPMVPGQLNYVLLGEFASGEHPWGFGQGYYLPLWDQDAYYEAVGGGGGILGKAGSRADDVEQGDFWTGYYQKIEVTNKKPEKLGEIKINTDKLRPNGGLLTFELCEGVSYLCLGIFEEYDMEGIKTSMLKGDLSNMQWALTSYNAPYILNAQTYEIAKGQTDLSFNLTEYFIKFTPGTKYYVYAVGINDNTGSKQAFAKLEGFMLPEPTKPAPEVTVTGIDAPEGHEESPYEVWFNIKCTTGDAVTAKYAANYEREWEVELNAGRTNTDLIENGNAFTPDEIEKINSAEGYNVMFSTRPDANTYLGVIAYNDEGTGNDPDEDGSAIGKKRSMPVPDKEPVDSKYFESLLGEWTLSAEYEGGEAPMTCKVEIVSGLTCPESLSQEVIDYYLNNTNYSKEQVEKLYEGFKKQLKLYNERLRGQNRLLCLGLDIDRPKYEYSTNYLAGWKTPYDLFIATTEEYNGYDTESMFFDFGPKWYLEMKSDGSVVAPFDVTNLPPLTLWNKGAEYYFIGISKMAITQGEFPVTISSDNSTITVGGYEYEGDTYYPNAAKIMYGGQYSTDTRVCGALTLTKGWNGESVKSVVKGGKSVTTNDVLGAERAVRPLSRTSVSDAKSYEPLKVTPLAEKSLRERWKQRAAGKYIRRMLKKLFGLALALLATLAVSAQVRVGEGQLSGSFESNSIYYQDDSGLGAAGTAPDDRFGSNNYMKLDYMNGRFSAGLQIDAYLPALQGYEIGQQPGAYHFYLSSKYIQWQDHNYSVRVGDIFDQFGSGLIFRSFEDRQLGFNNSIEGVQGIYRFGDYVEVKGMYGRPRLYTDYADSWVRGADLHISLNDIFGWNAAQFSAEGSYVNRYESLDKDQTIDFASRGLTSPNLNMYSGRLNFDWKGLSLKGEYVYKGKDIYSTVADVAAAGNAILVEAGYNYGPFSISGSFRRLDRMGTMLSLYGSGTGNVLNYLPSLTRQYTYLLANLEPYIVNTDGEIGGQVDLYYTYRSKSNRHRYWNFHANLSTFYTLRSEQSESGERELMWRDINIDVERQWNKKLKTSLLVSIQKRNPSHGFQRQTYVSNIFIGDVTYKFDSKKSLRVEAQYLYSTDYEGDWVAALVEFNMVPHWSFFVSDMYNLDETEANSFTKTNYYSAGFSYLKNRTRIQLSYGRNRAGYVCSGGACRYMPAYTGLNLVITSSFMKFKKFIIPALCMAMLSAGCSGQDPVTPGNGQNGNGGTNGNIENGLQVTASTTVINADGQDAARINVYYDKVKLSLDAVAFYDAKSNDVLDLSKFTIEDNTLVYTVTEPGEFSFWVAYKTHNTKDRPTTISAVEFSVPDAPEDPQPDNTSFVRRTLITQFTGLGCGYCPFMIAAMEDVRKSAEYADKSVLAACHTYGGDPYQPDVPLDYAMGVSTYPYVNFDFQTGVGNNGYNNNVSNIKQAIDKSLSADAGAGISVGMEVAGNKLVARVTVKAARSGSFRVGAWVLEDGLTGTQLNNGMKGDYDFNTHNNVIRHVNSRYSGSDYSGHEVGALAAGGTGEHLFTMTLDESWVVKNCHVIFFVTELVDKGYAVTNAIDVPVKSSTIPFEYRMRVDRFGYKVEITDEAKRTLTVIGYQRKYGVRTLLECIEEFLSGLIVDGKLYSGERVIVEPDGEKEVILRGAMSDGFRIPAEAIIGKNNTLFALGDSTVPFCKKRESKSYVSVTPLSVMNKTAHQVISEIALYGPSEKESKLEYESSDYLCLACSLTPYGTVNSEVASVEFATGKVSPSDNQIEIVLGTVTSDAVSFNITTTNSDPYAVFMKPSSNFKGKRDEEIIAYFKDQIARSRLERGETQGSYTQLDSSTEYSIFAFGYKGQSVTTGLFRKDFTTETDIAKITFSINVDMSWGFHNIHIIPNPITALYYYEIVTEETTVKESLQIIDEIAKQKISSGWCRDRAHFFKTYGFEGEYWGSYMGRFEKLEPGIYKVVVVGVDAKTGEYNSVVAFSEPFKTEEYMMSSLIFLNNVKDGVDLSITITPDDTESRYFSKIVSKSELAGTGMSNAEYMQASVDQYIVLVKSMYCSITFKGRKDPQDPKMVKLEMIFYKTGYTRIPRVVSITGAYKCWNNETLSFESASSEYLKKNQLLLELKEKYMSVAERWEKEWRNFSVLQWADCFKPKEEEKAKQELKVLTVLKLINVRIEYFENHEKFKNGKLVKSVGTASMYKQFRTSLSAFTQRQYNKDLSRFYFTDITQKFLLEYIVYLERRGIENGNRAGLRQLLRIFRALVNYAKDELHMYGANPAIFEAATEKMAWGQVESKAVNPNIIRRIEFMDRSLFSEQEMIVYERTKFPKLAKPLLIDRLIVILEKYRGKGIGNYVFPVYTEKHVTDKQKMGRRNSFSTLVSETLDKVCEILGIDEKMTWYTARDTFISSELDAGTPITHVAEMAGNSARTIEKHYYKNTKQKELRQRMNARYGSMKESLERINVISNIGHLTQHLKRIVENPDDEVHIGGDYKAIAPQSLIKKHKKEFKFFIAELSEKIASCLMPSVCDNMNRTLQRIARDCGLKKHICPQLVDRSYVHYYEYPMLNRKTFFVSFFLRRDRVMKNGTAPIMARISVNGIAKEIYTQCRTAVDKWDPAKGRATGRDRLSYEVNAYIDDFRAKVIEIYRTLQAEGFEGNAIEIKERLKSPGKQVRMLLAELMLYCEKRQKEVGVRITQLTSNKYYRLCRYLHEYTRLEYKKEDIRLTEVTYGYLDGFNTFLQTAHRCHHNGAINILDCLRNFILYCLRNEWIEKNPFKNYKLKEVAPPPKEHLTKKEIEMLIAKPMPNLRLGNVRDIFVFCCFTGLSYSDMKKLTFDHIKTSFDGDSMQADFSIFVRMDRGEIIIYRTADGETRLEVRMESDSVWLTQAQIARLFGVDRTVIVRHVNNIYKSCELEREATCAKIAHVQHEGLRQVRRMIPYYNLDMILSIGYRVNSKNATQFRIWANKVLKEYLIKGYAVNNQAKAEQLEELKKTVRLLSHVLAAKEVTKSEAVGLLRVITDYTYGLDTLDRYDYQQLEVSATTSEEPFRATYENAMAALQVLRDKFGGSALFAREKDESFKSTMGAIYQTFGGRDLYPSVEEKAANLLYLTVKNHSFSDGNKRIAAFLFLWFLENNRILYRPDGSRLLDNNTLVALTLMIAESRTEEKDVMTKVVVNLINKNNMATMNTADIGFEREIWKAADKMRGNIDASEYKSVVLGLIFLKYISDKFETKYRQLVAEGEGFEEDKDEYTAENIFYVPTEARWERIAAEAHTPEIGQVIDNAMRAIEKENKRLKDILPKNFARPELDKRRLGDVVDLFTNIRMHEHGDSKDILGRAYEYCLSKFAEAEGKLAGEFYTPACIVKTLLMLLPMIYGYIRVSSDKQTVENQRFEIKNFCDNQNIKIDGWIEETISGTKAYNKRELGKLLNKVQKDDLIICAELSRLGRNLFMIMEILNICMSKECRVWTIKDNYKLGEDIQSKVLAFAFGLSAEIERNLISQRTKEALARKKIEGVILGRPKGKKVLQRSTNSTIRGFSYKNYMTYVGIDVSKATFVVAYSSAKTGRTKTFKNHGMDLLTSIKGIGVTLAAALIVATGGFTYFDNAKQLTRYLGLSPIYQQFGTSVNVKGHINQNGDSNLRSQLYVAAFSSLRCNAECKACFDRLRSNGKPGKVAVVAVANKLIRQAFAVVTQGKPYVDGFKSEKPMKVFYLGVDVSKKKLDLCLRSNGKDILYDVIPNDLSSIKSWLTRTFEKFFLSEDSLVVCAEHTGQYTYPLVCATKSIGVYLCLEDAAKIKYCHGIPRGKNDKIDACRIAMYAERYNDCLQPYTASELIIQKLKNLSTERSMLVADRAKYQSQLKDQVDYMEHSIYIAKCNRVEGIINTFTDYIAQIDLEIKELINQAPVIAHQMDLLMSVDGVGERVALKMIMETDAFTSFTDPRKFCCHAGVVPFVYVSGSSQRSKNRVSNRADKSIKHLLHMAALSVSQVKNSPLKKYYDRKVEEGKNKMSVLNAVRAKLVTIMFAVIRADAFFSRNYQNSLAMSYFYTQSRQYREESRALAGLPFVISFAGIDYLCLYMTITDKVFPHTFTLFFFAAMNRHMYILADGGRIAASGPSEFVRLLREGSWFDSGCTDKEYMMNFSGRYRELHGVTVRTDTPEHFMDDLKKYGYIKGMNEQIRSILAQETTKTSKIRQLYLLGVPRAEIARMVTNGNYGFVVNALRRMSECECGPNIQPLAAAPDYTFNRKFGIEIEAYNCSRERLARELRESGIEVVVEGYNHTTRPHWKLVTDSSLNGNDTFELVSPILVGEAGLRELEKVCWVLELCDVKVNGSCGLHVHIDAAGFSMETWRNLALSYKHLEPVIDRFMPASRRDNYYCRGLGHVSDGMIRSARTVDELKGRIGDRYHKVNLEAYSRHKTVEFRQHSGTTSFTKMRNWVLFLHKLVTFATRGQVPAGTALQDIPFLDGEQKLYYKLRTKKLSAMKKEKELLVAVASQKGGVGKSVFTVLLASVLHYRKGLRVAVVDCDYPQHSIALMRERDMESVMKNDDLKVSLYRQHERIRKPAYPVIKSDPEKAVEDLHRYMDEKGETFDIVLFDLPGTLRSEGVVYTVAAMDYIFVPLKADNIVMQSSLQFTKALEEELVARKNCNLKGTWLFWNMVDRRGRKDLYDAWNRVIDKMGLRLLSSHIPNTLRYNREADPVCKGVFRSTLFPPDPHQEKGSGLPELVEEICRTIGLEEPDTDRMGPGGMDADRIREIMGEAPACPRKGRGTSGNDIMRPARKSGPMQPSVYGEEYLHGIAGVQRRSLHIPAALHRKLSILAGASRNGTVTLEGFINHLVSRHLEEYRETVEMILEESLPDRSMDSEKEKNRLSDIVLERVGLTGNLLSAPVSPSPEPAVDMPGHERQVRAGKVTAPEEYKRRFLVPAPKSVEWKTAYIDGRLHRRIAMLVRAAGCGSISGFIIRLLELHMEEHREDIAALLGEVYRPWDEDGQPGEPARRMRYNDFETMSIYTVENFTSDITVEGYIAEFRDEPHFLELCKQCTNYGKSWGCPPFDFDTESFLRQYKYAHLMATKIIPEDKDIPIEYTQKLILPERIRIESELLDMERKYGGRSFAYIGKCLHCSDNECTRNCGTPCRHPEKVRPSLEAFGFDIAKTLSELFNIKLLWGKDGKLPEYLVLVSGFFHNEYELCNIAYMIELQHFSIGYKENSLLHEVNATIKKGQLTALIGRNGTGKSTLLRAIAGLNRCYSGKIILDGHDIACMKTEDMAKTLAVVTTERTRIANLRCKDVVAIGRAPYTNWIGRMQETDKEIVMQSLISVGMEAYANRTMDKMSDGECQRVMIARALAQDTPIILLDEPTSFLDMPNRYELVALLRRLVHDEKKCIMFSTHELDIALSMCDSIALLDTPNLSCLTASEMQKSGYIDRLFQNENIRFDSLCGTMILKQMRSRSTILFSILITLTVGLFLLDLAVGAVNIPIRDVWAALTGGNCSRATEKIVLNIRLIKAIVALLAGAALSVSGLQMQTLFRNPLAGPYVLGISSGASLGVALVVLAGIGSSIGIAGAAWVGAAVVLLVITAVGQRIKDIMVILILGMMFSSGVGAVVQILQYLSKEESLKAFVIWTMGALGDVTSGQLLILVPSVFAGLLLAVLTIKPLNLLLFGEEYAVTMGLNIRRSRSLLFLSTTLLAGTITAFCGPIGFIGLAMPHVTRMLFQNSDHHVLLPGTILSGASILLLCDIISKIFTLPINAITALLGIPIVVWVVLRNKSITAMNALKNLSLILLLSLAFTGCHNKSSKINDFNLLLYAPEYASGFDIKGAGGKESVLITVRNPWQGADSVTTWLFIVRNGEEVPEGFAGQVLKGDAKRIVAMSSTHIAMLDAIGEVRCITGVSGIDYISNPDIQARRDSIGDVGYEGNINYELLLSLDPDLVLLYGVNGASAMESKLEELDIPFMYVGDYLEESPLGKAEWMVVLSEVTGKREKGEKAFAAIPVRYNALKKKVADSTLGTPSVMLNVPYGDSWFMPSTQSYVARLITDAGGRYIYQKNTGNASIPIDLEEAYLLASDADMWLNVGMANSLDDLKASCPKFTDTRCFKNGEVYNNNARTNTAGGNDYYESAVVNPDIVLRDLVKIFHPELVQEECVYYKQLKMFVGVSLPFLLAAQQKNSVSITKRVLRIPEVTVVGKRPMKDIGVQRTRFDSIAMKENIALSMADVLTFNSSVFVKNYGRATLSTVAFRGTSPSHTQVTWNGMRINNPMLGMTDFSTIPSYFIDDASLLHGTSSVNETGGGLGGLVRLSTSPANHEGFGLQYVQGVGSFSTFDEFLRLTYGDKHWQSSTRVVYSSSPNDYKYRNRDKKENIYDEDKNIIGSYYPTERNRSGAYKDLHVLQEIYYNTGEGDKFGLNAWYINSNRELAMLSTDYGNDMDFENRQREQTFRGVLSWDRVREKWKVGVKGGYIHTWMAYDYKRDKGNGEMASMTRSRSKINTFYGSADGDYAPSEKWLFTAGVSVHQHLVESADKNIISQEGNKAVVGYDKGRVEFSGSVSAKWRPVDRFAASLVLREDMFGTEWAPVIPAFFIDGVLSKKGNIVAKASISRNYRFPTLNDLYFLPGGNPDLKSEHGFTYDVGLSFSVGKENVYALSGGINWFDSHIDDWIIWLPTTKGFFSPRNLKKVHAYGAETNAHLDIMLGKDWKLDMNGTFSWTPSINESEPMSPADQSVGKQLPYVPEFSATVTGRLSWRTWSLLYKWCYYSQRYTMSSNDYTLTGYLPPYFMNNVTLEKQLSFRWADLSLKGSINNLFDEEYLSVLSRPMPGINFEIFIGITPKFGKNKNSKRMIRVLFFIRMTMSRTIQRICLFLFCLPVFGSCMKWDYGEMEDFSVSASGLFITNEGNFQYSNATLSYYDPATCEVENEVFYRANGFKLGDVAQSMVIRDGIGWIVVNNSHVIFAIDINTFKEVGRITGFTSPRYIHFLSDEKAYVTQIWDYRIFIINPKTYEITGYIECPDMDMESGSTEQMVQYGKYVYVNCWSYQNRILKIDTETDKVVDELTIGIQPTSLVMDKYNKMWTITDGGYEGSPYGYEAPSLYRIDAETFTVEKQFKFKLGDWPSEVQLNGTRDILYWINNDIWRMPVEADRVPVRPFLEFRDTKYYGLTVNPNNGEVYVADAIDYQQQGIVYRYSPQGKLIDEFYVGIIPGAFCWKMKNYFLPMLLSLFFLGACDKNDEIIPEDADENFITSVVMTVDGKSYTADIADNTVTITVPYTVSLNNAEVEFKYTTSATIIPDPETVTDWDNERTFRVTSYNGDAREYAYKVVKSEIESDGDVELKTTEEVASFAATKTTVVKGNLIIGSDAEEAEKITDISALASLKEVTGNIVIRNSYNGADLTGLENIVSAGGLQVGSADVASKATELHMISMKALETLSGDISVYNDQVTYVLFEKLATIEGSVMFNASSLQSFEFPVLTTVGQNLNLQGLNEENTAAGSIASLEIPELTSVGGVLSVNNLAKLTSMSFLKLKETGGLDFHTVPVMLETINLPEIETVNGSIIMEANMEAPPTGSFVPQRNDVLQAFGGMDKLTTIKGQIKIKNFTALKQLPDWSKITTLGSITLDYLEDLSGTLTLPNARFETFGETAPQIEIINKVQLSKIETAEDLSNVNFVITSLTNNKFPEITFKNIKDFTCKPTTNNTDYTISTIQHVYGNLNVTGQMRSNAKFPDLEIIDGYGYIQIPMMGTVTMSSLKEVGGQFYLSGNLTGCDLPLVSKVCCSTSPVYHSEGMGAFAITLQSKSLNLPELLHVGGEGLFINQATGITCDKLQTIDGTLQIKRATSLSQETLSMEKLETLHGVVFDGLTKFTDYTFFGKFIENGMITGESWSVTKCGYNPTFQNMKDKQYTQQDMHRFHYFIISACMLFTSCNKDEVITEEVGGQPIIELDSETGIYTVKVDHELTIAPTYQNVEDALFAWTIDGTLVSSGPSLQRTWNECGDFYVKLRVDNAEGYAEEELKVEVKELTPPVISLALPSQGLKVVRNTDYTFTPDIQHSDVEGFKIEWVREGKIVSTENTYTFNEKELGVYTVTINASNIDGTTTKDVSVEVVETMPYVVKFPTPSYQQTSTDRYTFADRPVFLRPLLEYFDNPRFEWSVDGQVMEGEVKRMFKFTPSAPGEYTVSCTVSEDTPTEKISRNIDKGKTAVTATVKVVCVDKKEQDGFRASGSSKLWNKVYEYTPAPGQFINETSTIGGMTGNETSPEAAVAWATQRLKDKLHVSLGSFGGYIIVGFDHSIPNSGNQYDFCVQGNAFDGSSEPGIVWVMQDINGNGLPDDEWYELKGSEAGKEETIQNFEVTYYRPEGKKMDVQWISSDGRNGWVDYLSAYHTQDYYYPAWISENSYTLTGTCLAARNTQDSQTGYWDNQSYDWGYVDNFGNDQIEGGSTVDGSGQRNGFKISNAIHADGTEANLQYIDFIKVQCGVLAKSGWLGEVSTEVFSFEDLTKMKRKLRFLAGACLFTATALFSGCSSDDDFLMEPVYSGTPQTRAVTNPDGTLTITFDDFDSGMLAGPTSAGENLYSYQGYPQVTTIYDNTPEEYLFLSMFNTVGGSTEYSSGGIALSNWNIRSNQSGNTGDWWYSYLNQCSVYNTAVEAEGQNKEAGHSGSNFGVVYGYVDAYNQAWMAKPEFYFNVPRKLVGLWICNTSYTYGVITYGNQFGSTGVATPLKEMKGYFQVNLECYDANGGLIRTYKRLLADYRNGQQQVDPITTWDYWEINAEGVQSVKFNFEGSDSGAYGLNTPAYICIDDITIQMNYLELICNIDNFAVGKWFREVYAFRMKREPGKNPGQYPLLMGRITINGTQAGFSCKKEVSLALWDVKTNRAKGKSEEARTLNQELDNIKAQITRHYQYICDHDSFVTAKKVYNRYVGFSEECHTLMNLFREQLEPYKKKIGIEKAESTYCGLVADYKSLLLFMKSKKNAEDIVIEELEKSFIEDYYNWMLGTCALANSTVFGRVNTLKWLMYIAQEKGWIRVHPFASFECMPEYKRRSFLSEEELQRIIHIEPRYKRQRAMRDMFLFMCFTGLSYVDLKAITYDNIHTDSDGGTWLMGNRIKTGVAYVVKLLPIAIELIEKYRGTDEKKDSPNVSFRMVCDKLREIPLTQKHGISLSYLAFILLCIVVYRIEMLLSQVKCIFALKESFFDRGKRKQNIVIRSFLNRYLILVKQKMLHGFDYTAFFGKSDLERAKAISGGVDFLQAPEREEPKKLFIKEALLLRQALSLCQSLLNYEQRLEAAYFEAVRTLLTRIEGKGKMSLREINARINELLKQSIKSDGVINLFSDVEEEFSLFDPKFLEEISRMKERNFAVELLRKLIAEMRIYQRTNTVRAEKFSEILSRAMSNYLKGLLTNEEVIQELLKIAHEIAHGKESDKALDLNDEELAFYDALTKPEAVRDFYTNEQLVAITRELTDALRCNKTIDWNLKESARAGMRRIVKRLLRKYDYPPEGQEDALSTIMKQCDMWSENSMTDQLIFVHDKRRDAYVDKTSEIVGLRPAGAYVYVDYGAARVFRYRKEHVVCYPLLATRRQVRIYKDGTLQEPYDTLFDYGKYVRLGAGEGLRSPAIEKSRIEAVDAQPLPADKERLLSYFAEVLAAKASLESETDTEAAEEVPEGEKKSSIAALLAETMQRIDPQDPRTALYAYLNGRTAACDVDNVALVYPFGCNASQKLAVQRALGNRVSVVEGPPGTGKTQTILNIVANLLMQGKTVGVVSNNNAAVDNVRDKLSKYEYGALMAELGNRTRRQAFFADKQQDFMPDPTWRLPAEERTALRTRLGELSAAIDELFRVNAELADLRTKRSYAQCEYRHLLWEQPLDEARMRRVDRCFFRPIDSRRALSFRHLVTERWQGGRPSLALRAGLLFRCGAWPGKRLFADAELLPAYADRKFYETYIAELSARIARLGAPSDEQRAKSLIEAYGKVSEALFRDMLYRKYERLNEARQEERPPFTMQNYRTHFRTFVERYPVVLSTTHSLCASIGAGHLLDYVIIDESSQVDILTAAVCCACCRNIIIIGDSRQLPHIVEEQLRAKAEELRDKHRVPDAYDYVRQNILSSFKRVFGERLPVTLLREHYRCHPLIIDFCNRKYYRNELLIMTEPKGDYPFTVLTTTASKTYSHNGRIYNQRQIDATCDWIERQHTEYAAMRFASDAKRESPAERIAERLIGGILAEEDRFSAIGVHRHYRLYDLVGRNVELSDEERLFVRRRSHLDFLLYNRMDNTPILGIEVDGVLHHRFDEVQVARDRRKNGILVKIGLPLLRLSTDGSSEKERIVGALEQAMQQGMEEQHKERKASYKYSFRLDEQQNIRFCRMLAEAGLEHNRSRFIVKRIFAEEFRVVRIDPTLGRYVTRLNQFYEQIQRVGNNYNQIVRAVNTHFSHTAIPRQVLLLERRTRELKALSEQVIALSRELYELWSRECEMHEVIHSLTSFRHGRKSFTIRIKLRFADYLRNDQSERPDKGRSLRYRAVGVGMQPASCSTAGMAVEYGMPIDVLAKILGHSNTNMTRHYAKFSETVIGRAMEAFGERLASAASAEMKVEKFKVLLYLKKSGLDKFGKAPIMGRITVNNTMAQFSCKLSCAPELWNPRESRLNGKSKEAVETNAKIDRLLLAVNSAFDSLVERKNDFNATDVKEMLQGSKDTQMTLLKLFDRHIEEVKSRVGIDISHRTLPNYIYTRNRLAEFINCRFKVSDLAFCQLNELFIREFQEYVVIEKRLGVQTVRHYLAILKKICRIAFKEGHSDKSYFEHYQLPKQKETPPRALSKDDFEKIRDVELTGCRPEHSIVRDMFLFACYTGTSYVDVVAITPDNLSKDDQGAPWLKYRRGKNGQLCRVKLLPEAVVLIEKYKDETRATLFPVIPYQALKWCLTSIKMKVGIKGRLSYHMGRHSFSTLMTLENGVPIETVSRMLGHADIGTTQVYARVTPKKLFEDMDKYIEATKDLKLILMRSTFSILYYINRGKVKADWTTAIMCRITIDGKSSVFTTGYYCNPECWNTKNGTVKDGRTNGLLANLRARLETSYMNLLKETGMITAEMLKNEITCVGTVPVTLLKTGEEERERLRIRSVAINSTSSYRQSKSTQAYLHEYLLSMGMNDIAFEDITEDFGWEYKLYLKGKGCGASHINHCLTWLNRLIYIAVDREVLRFNPLADVPYEKKPTGKLKHISRAELQRIMEQPMPERLQELTRRAFIFSCFTGLSYVDVKRLYPSHIETTLDGRKYIRINRKKTDVESFIPLHPIAEQILAMYNTTDESNPIFPLPKRDMLWYCIHEIGIVAGIKENLSYHASRHSFGTLMLSAGVPIESISKMMGHTSIKTTQGYAKVTDDKISEDMDKLIKRRQEQKNNPGQSSVPSAVHRSMDTDGSGNKRLTEKSEEKYKTAYRWKLNHIRFYFYMLFPLLKKDIFMDSFQEKYNALIIKYNALLTENEELKSILSQHGIVYSSIKRADESAAFSSITYPPIKLSLDEKIALFRNFFKGRDDVFARRWFNKTTEKGGYQPVCINEWRRGICDKKKHKCAECPNRNFAPLTNQDIYRHLEGKDENGCDVIGLYVVTSDNKCSFLCADFDDKNCTHGYKNDVLAFISICREWRIPFSIERSRSGNGAHVWTFFNEPIPACKARKLGNTILTEAMKRNGRMTFDSYDRFFPNQDKVPEGGFGNLIALPLQGKARKAGNSVFVDDQFLPFQNQWAYLYNVRKIDESTVDTLLTQHQQEDFGTLATSSENKPWEIPVIQDATQEDFNGRLIIHKSDRIYIPLKSISDKVSNHLKHIAAFKNPEFYSKQAMRIPTYNIPRIICRADFTDEYLAMPRGCEDAIINMLYSLKIDYEIVDNTNHGKPIGVTFKGKERDEQLDAINALMPFSNGVLSATTAFGKTVTAAALIARRKTNTLILVHSKALLMQWHERLSEFLDIDFTEDEISKKRGRKKAFSPVGCLDSTSNTLHGVIDIALMQSCFENDEVKPFIKGYGMVIVDECHHVSSITFENVLKHVTAHYVYGLTATPIRKDGLQPIIFMQCGPIRFSADAKAQIQKQSFQRYLVPRFTSYRPVTDDKQSFTELSQSLAESEIRNNLIVEDVLNVVAAGRTPIILTARTSHVELLAEMLKQHIINIIQLTGEGSAKNKRETLQKLQDIPKDAPLVIVATGKYVGEGFDYPRLDTLLLALPISWKGLVAQYAGRLHRENEGKKDVRIYDYIDIHEPVCENMYRKRLKGYSAIGYRVLSKDTQTLFDNTDDLQTSSYEGQIFNGNTFRLAFMQNLKSSRQSIVISSPKLYHTERNTFVKMLRELHASGVQVAILTSEESSQTNYLKSLGLYVKIVPKLSLSSCIIDRSTVWYGSINILGYVTEEDNIIKITDGKLANELLDVIYNSGKMNNWLFLSLLLAHVIGDFYLQNDKYCAQKEERKFKSWFLYVHSLIIGVVSWAVVPIYEFRFYALAIAFSHLVIDVIKTYSPKGLWNFVIDQVAHLAILIIVTFFFDSTTKLPIQSMDCNGTYSIPLFILALLLCIKPANILIKLVLKKYQVGETQSCENIKNAGALIGNLERILTIIFVIIGQYEAIGFIIAAKSILRFKDTDTAKTEYVLAGTFLSFGIALLCGLMATKMFATISADIVSSTSLSVNETIGLKQRIESLFSLLKVSYPDFEGRQIKGDYIECVMQNVSNVFRIAFIIKSCIKSFSTAKNEKTKNFHTYGIRMAIGIGDMRIVNTEQGIWDGEAIYLSGRALEEMSSLNKGTMSVHTSKKQLSAPLQTIALLTDAILNDMTVRQSEVVYYKLLGFKEADIAKKLGISQASVNNASTATKWYCIEESIKYFEQINFKEYEMSNEIREKDHEWVKAFHSNFDRLLALLEKLLEKRQPSAYGDELLTDKEVAFLLKVSRRTLQDYRNNGILPYTQVGGKILYRASDIEKTLMKGYKEAYRKMEIISFEKRTFEEIATKLDRFVQRVESLCREHGGKETSEWMDNHEVCRRLRISPRTLQTLRDNGTLAFTKIGNRTYYRPDDVERVVGNVEDKRKEARWKGTTIMSFLYKQNLLEQSGMEKSLRQITAGSTDRPISIVHRVTMVTKKKLTKEEWEAMTGTDMSLILPSDGSIETARESSLNDIGKEKSEGTVEQTDTTSENLQPSTGKEEAVPTSQRRISSRQRKLSLDEYRKAFLQVPRIEDRKPVFVSGEVRDRLDEFVRRLGGRKMSVSGLLENIARQHLEIYSEDFEQWRKLMNDRKKNRPRGRPKVSGVCKLSKAVTVKFSKIDYERLCRRSRQANLTLAEFLRVSAFETTITARHSAEETAVIRSLTGMANNLNQLTRLSHQAGFHRTQRIVTELLQKLKEIIVRYRYGERRPSMIGKIKKGKSFGGCIRYVMGKDNAAIIDSDGVLLGNIREITDSFNYQCELNPKIKQPVGHIALSFKPEDKALLTDEFMAKIAREYMELMGIKNTQFILVRHHNADNPHCHLVYNRIGYDGKVISSQGDYKRNEIATKLLKNKYGLTYAEDKGKTNVEKLHASERVKYEIFNTVKAALRHSKTWKEFNDYLLRRGIRLEFVKRTKEIKKPDDIQGIRFTKDGQTFKASQISREFSFARLNAQLSWKPSETQQESEHKVQQRIPNGGHLFESTGPGLFSPTNGTAPEELLSQEELLRKRKKKKKRKGFGLMKLEEYIESIFGCLERIENKINGLSAPLLEGNSPTVNNEKEKDESVLNEVKNGHETFRKLLARMCEGLAAIKNDMISMDRKNSSQERLGQVLSEMRDEQRQNQEKVENLFCETNDTIRKNAVKTSNINHHFSLSIKSPYILGSFSVMFATIVILSVALYFSVRTDNVQVDNDLKYRYVKMKGEATPEQLVELENLFGPNRNNGQIRQIREDVEAYEETIQRKAALTEQARLKDQAARELDSKAKSIKDKSITDKPKKMSENRNAQYRYQVLDRCFSDWNKKYTIEDLLEIVNNHLYELEGSDSTIKLRQLRGDLNAIRKMLPDNIYLDAKPFGGKKCYYRYSEPNYSIYQNGLSVTEVNSLRSIIEMLSKYRGVTGNAWLEDVISNLELRFGVKSDRENLISFQCNSCLKGLEYLSTLIDATINHQPLEVSYTTHAGISSTNVLHPYYMKQYNNRWFIFGRINGRDYIVNRALDRIEGISRSDVPFCKNDLVDFNSYFDDIVGVSVPYEVQEAETIILQFSSERFKYIVSKPLHTSQEIIDEYKCIVTIKVIPTRELDQLILAFGPDVEVLAPDKYRMSIKTKIEKCLNKYRSVHCDCIMNMNYFSFYNKAKELLIDSLASLWFKGQAQEQEYIKRILTKDEPLFAEPVFQSIFPWEESADSFEEHSSKLRLLTPSFVNALSSEEVDKDLRFPLDRHPYKHQTESWRTMLSSRPQTIVVTTGTGSGKTECFMIPVLQDLAKTNEKNCVQAIFLYPLNALMKSQQKRIHAWCKALPEKVTYAIYNGETDKENRSDRYTASHYPQLVTRPQIRKTPPQILFTNPTMLNYMLVRAEDREILEKSKGKLKWILLDEAHTYTGSSAAELSLQIRRVLDAFGVTIDQVNFAVTSATIRDESDPKTTIKLKTFVSQLTGKPFEDIKIISGKRIIPELNKGIAEDQLSKINKKFSIELSYSDIEKLRKKLNSSPVLKAKEIGRMLDKGIGKNVDTSLEIIDALGEKVKGINNGGGLGALLPTRAHLFVRSISGVYVCTNPDCQRHKEYRLSIGSLTTYQNMNCPVCKSKMLELATCSSCGSPIIVGETSTTKGFRMHTNVIDLDKSLFYEQKEDLIDLEDMGNIEDVEQNEADGFSRFFFAIPKKACLRKNANRTYHIFNHRNGKIELVPEDNRSNKCFTSLKSEESIPVIYQSLRHSGDNHVLCPHCGNNLSEFKNLDYLRISATQIGRTLATLLLDNAEPIDSNDADVVYEGRKYITFTDSRQGSARSAMGLNQDVERSWIRASIFHKLADMRLNDVKPGGLTPDEEAEYNAYLSIREHLPTLLFEKFKRLEEKKNGTPVIPNPEEVSWGQISQSLENDSNFKKLYEHVDKARGRKNFKNATDYLKALLVDQFGWIPKRANSLETMGFVRLVYPALKNAKCPALIQKRCTDTDWQNFLKICMDYVIRGGRHYMLSGAYKDYLTQNKYCSPIYPSNSELRKNGSPVSKWFKVNVSSKGINENQNRLVLLLCAVLGYDDISQINQIKIADINSMLDAAWDFLRQNVLEATDVENQGYMLDLMGDKVKLQLIEKGYLCPVDNVIIDAPFCGYSPRMNGYIGRENFDRFKIKTEFVNPLFPFKSADQTEKNVMEWIEKNFFEQKAAGVFGVMNSRVFASKPIFISAEHSAQQSSEDLDRYEREFNEGKINILSCSTTMEMGVDIGGITEVVMNNVPPKSSNYLQRTGRAGRRNETKALALTVCAPNPIGTHTWNNPDYPITHVTETPLLKLESRQLIQRHVNAMVFASFVADQGGIRVTATLRDFFVTAEGMSFFDKFLNYIDSVISGKVERLQEPYSKLIKGTSLAQITLADAAQVVKKDIVAVYNVFDAHKGALAKAIESLKNESGTTNAIKAIEKQEENLLKTSMLSYLAENSFLPSAGLPLGLVECLLGGKEKVDGNSPTLHISQAISSYAPGNPVVKNEWVYEPNGIRLKTKYDDSTSRYIIQNCTHCGYTTIIYGSAKTDCPKCGRHGTMHGIKDISLSTDQRFTEVVEPAAFSVAWDSTPTRKMDSLGSMNFIQPILLEMDAWLLKTNSAKMSIRCSTPRSEILFYNKGTSGYGYAFCPYCGRMKSEKSPDSTERMLSHHKHLLASTSCPGGENDGAAVRRHVLLVGRYQTDFVEIKFYDKDNNLVEDTETLYSLGVILSRKLTELLGVNDGEIEFGYDGINHSIFIYDTALGGAGYSLLFREYKDEVLKMALETLERCDCERSCTKCLIDRRSQWYTNYLNRPKALEWLRQEVKARVAPKEIIYLMPDSHAVTSDITTEFYQLTRNKDISGIRIFVDDNISQWDAETFPFIKILTELSLEGVDVAFILPSVPDVKSLSSADSATLIAEVFKTNFKCLENTLPTGLFPLMVVIMNDGIVKTYFGKNIDTSYSKNWGSGDVFITTQPNSLSYADINRMQLLSAFSSDDSSFMFEYRIREHSSLGRFFDSLKAPETGNWNRIISNLRGKAVSIEYSDRYLKTPLGCMLLAKMISSLKNEADLVLVSIKVIVTNIVSINDSDVAVNAIKDFANGKKRNHFLKDAIFELTGIEPEIQDTGYVEHERCLTVKADNAEVCIRPDAGIAKGWAPFGRDNAECTDRDFREDWNIDLELFNKQQIGNGILYTISYKQLMVNICNSEQHVVLMRILDARNRPSITPDMPLWKLKLTEEEYTNLKETLVQNAYRLEDFGIEAALCYAEWWRRDYNGGIPSREDVAVGLGLPHYCWEQLYKAARHGLKSHGFAFIHSLKGNEYFRTLLNQGGLPVNYIKNGTNLSGFSRFLIGLVEELSSINIDWDDNNIDLIKNFNCIAYLGKAFKNDNIYDVSLQIAHAIISEEDRWLPYDDTDSSLSELTKSLKREYRRVKSEHRTKPLSLSWKLRLTSSKTANLFVNLNIVKEISSKSIEGLNYQSCYTFDVFVSGILVGKYVRKSLVKDDKGEVIGAIYSRITVGVANDIKWSGEPVVEVKIRCDNDDRLFPTLCGSYPPNFECPQVFQMLDDNVYSLKSTANAENNIAVFSTNWKCDGSHNLLLNGELYSAIKFTDKVDLHNCMSNEDITITNEFTPYSAEFRGTYIQWVEQSNFKLLTRIPVISVFDQTGTRVGNIKPKYRVHNSKAEWRNLSNSCLLPFGLVDIKVEFPDNKYVMETFYFIDDMTFVSRNETMFSTELHLYSRHVISAKVDECENLSVEMTDKNTWRISRDACASKYSPTCNLKIIAENNPPLKVSVVAPFEGIVISDLEGKIVPSGKIISYDNLRYFNIISHGQSGMIDVTYKSDKIKDDNTIKHLKSPVIEGIVPLSDYRDLFARMFQLYGANTFDRSSSIELKICDKRIYIRKFVLDSELSSDKIRITDYTSEDTSDFIYDGDVYALPVSENIKPAELVQIKLEPYNRQMNLFTIPDELLNSEAILFSGPESSRRLVPKYYNFEQEDYSSEVRGEMSAANTILWSERLCKDDVFAGEYWAKTVKAFRIISEFNLPFTTYNAFKAIGCEPKLLVNLILACWINGASDVLIQEIDRFEDELNIAVHWIPHTVWGECIESFIRSLPPTLINIMNTKLGEITELINALFNATLSAEVASELTQYVAGGNIGNARIFSRADINQFKSKIHGCTDNNIDLPLTRFVLQNKYYVDQEMHKSYRVMIESAMCAAENFAQVKNRTNLFLLESRDYARIINFYRKYFKETYSEIFIGTVKQIVNKMNTTIEAVLYTSKTLSNGQHPIMLRLTKNRKRKYISLHISLALQYWDAEKCKPRRNCPDKERIEALIQQKTQELQSQVMDFKTSDKEYTLNTLVEKASRKVVRQTVGEYLNGYIDRLLAEKRVGNAKTFQELRTSLTKFCRSLDFYFIDIDAEWLKRYEQWLRVERHYSDNSIGIRFRSLRVLYNSAITDGLIKKTDYPFDTFKVSRFKEATAKRSLTKEDIRRIMDCEVRTLTKYPKPFLQLAKDLFLFSYLSCGINLTDILHIRYADIVDGRLVFNRQKTGKLLSFQLQPAALDILDKYRQPNAHPQDYVFPVLRRSVHITAQQQYGRVQRTNKRINRYLKLIGEHLHLPITLTTYVARHHHLSYTLKISSLMPSFPGNDISTDKLPEKNPNKAQITSNQTLSMYYIQNYPSYQDIKMKKALIGLLAAGTLVGCGGNTYTITGKLDPGITDSVFLMQGNPENPTIASAAVAADGTFKIKGTIDQPDLAILTNRHRQGIGFIFLEPGKIDVKTADLGQFQVGGTRSNEIFQPINDSLGMLQGQFLVAMQENDMEKFDSLNQVANGIMRRALDNNSDNLVGVYFFGNLYNEMEPQEAREILNKFPEQMQKTQILTAIAKSIAAQENTEIGKPYLEIALPDSLGETVSVTPLIGPGKWVLIDFWATWCSPCRGELPYLKEAFKEFGPKGFNIYGVSLDNDAESWKEFLVKEEMTWPNVIAVTDGKSAPIVEEYGIRSIPTNFLISPEGKIVAKDLRGEGIKEKLAELVKMGIDPGTNYMGYGVLEVCGREVRSVVLGDIDLHRMNDPYEKLRYIFERVGALVDEYRPREVALESPFFGENVQSMLKLGRAQGVAMAAALSRGLQVFEYAPTRIKQCITGRGSAPKEQVAALVSSMLTIERPPRRLDATDGMAVALCHHFMSSNPLNGALGEDRFKGLGGGRKAASAKGSSSWERFLKDNPQREIRQTPRTPQKTNHKPTKMMEFTAEMIAGFLGGQVAGDKEAKVHTVSSIEEGEPGALTYLTNPKYEKHLYKTRASIVLVNKDFTPSEPVTATLIKVEDTGAAVLKLLQMYQAAKPRKQGISERASISERATLGEDCYVGDFAVIEAGARIGADCQIYPQVYIGDGVTVGDGTILYPGVKIYEGCVIGSRCILHAGAVIGADGFGFIPNAAGGFDKIPQLGNVVVEDDVEIGANTCIDRAKTDSTIIRRGVKLDNLIQIGHNVQIGENTVSSAQTGIAGTSKVGHNCFLAGQVGIADHVTIGDRVCIGSKSGLDKDVPDGEVRFGYPALPGMQYHRASAIFKNLPDLARRVSQAEKEIAALKEKMSHTIAIFPGSFDPFTRGHQALVDDALRIFDKVVIGIGNNVSKAGLLRIEARKQLIEDLYADNPRVEVRIYTGLTGDFARDQHASAIIRGVRNTTDFEYERTMEATNHRLHPDIITVMLFTPAPVADIASSTVREVLAFGRTVDEFMPEGIDIKKYLMERILLRNGIPEPMPRIEGTYLYQTLHVRGRRPLWLDRHTELLARNIQELFGLRWAPDLRRLEAEIAALLDANRHPVAGSSFVRMAFTPAGDLLLIPGAVSFYDGYALRSLRPAAAVVNYGVPYPEYPTSAREAACMLALQAAVTADNRAAEADIERAAVRTGVQAVIRCDGEGFVHVCDEAPLFAVKGKKVYTPPAPPSVERELACRAVEAARLPLLELEIGREQLARFDEIFYVDHRGLTSLSACEGQLYAAIITERIARVLNKLYMAKSGVKFKDTMAAYDRLRGEIAGRKFAPVYLLMGEEAFFIDALCDLLASTILQESERAFNQLTVYGRDSDAGQVVNLCRQMPMMGSYQVVILKEAQQLRGLDKLSLYTSKPSPTTILIVCHKEKNVDKHSQLYKSIAQHGAVLESVRPRDYEIGPWLAQFVASKGCTIDAKAQAMLTDHLGTDLAKISNELGKLLLSLPEGTKKITDAHIEQNIGISKDFNNFELCKAVTGQNLEQALRIADHFARNPKDNPLLVTILALFNQFREIFRINYLRWLSRHKGVPFPSDTELIGILRMNNAYALGELKQTSARWDNRRVFRILGLLREYDAKSKGMNAGGAPDGELLRELLLKIFLQMNLLDNFQRYIRRNELAAPEDFILLTVSGGVDSMVMLSLFVRSGYRVGVAHCNFQLRGVESEEDEELVRREAEKYGVPWYNKRFDTKGEMERTGESMEMAARRLRYAWFDELSREHGYTVVAIAHHIDDSIETFFINLLRGTGLRGLTGITTHAGKLIRPLMFASRKDILEYAVAQHIPYREDSSNRSTKYLRNKIRLGLVPRIKEISPKFTDLMRQNIGRLTDAQLFINHGIQRIREEVITTENGIDTIHIDRIDRAFPLNFVIFELLNSTYSFKGDVSDALVRALEQNSGTGKRFYSKSHVAYIDRGRIMVTPIPADDPCQVQVEAGAPRCYCGNSVLYFELRDIDDIQGFGVPEHIAQVDADKLKYPLTVRRWQEGDWFIPYGMSGRKKVSDYLIDHKVPLPEKARQFVLLSGDEIVWLVGRRIDDRYRLTAETENVLRITKEIIMIREFNNPELAPRNSFHVAQRAARLIEFDRTEDLQELFEKGMPDPWYVLGGGNNVLFTQDYPGTLLTPVAQGIRIVDEQPDCVTVEADAGVEWDDLVEWAVQHELWGLENLSLIPGKVGAAPVQNIGAYGCEAKDAIRSVEMFCTETFNTLVLNREHCAFGYRDSVFKRSLRGRVIITSVRFALSRTPRPRLEYGDLAAAVEARGGITLRNIREAVCAIRRAKLPDPAVTGNAGSFFKNPVVGREEAERLSALYPDMPHYPAADPSQVKLAAGWLIDRAGLKGHSEGRVGIHPRQALVIINLGGATGTEIVAFARKVQEQVKKRFGVEIEPEVNILMQFDVSDKRGRRGRLFARRRERGPQFAVFGRVVRDVVSGRENDRSTVSIYASEKGAFCNRRAGRRVREEKNGRSRCFLSPASSGVGRCGADLAEREMFTKEDFVQMEEHGLTPAALETQLKNFREGFPFLPVTRAASCGDGIRVLDAAGIEQAAARYDRAKESLRVVKFVPASGAATRMFKDLFEFVREGRRTAVVGELLANRRRFAFWPELRTIIGDDADELRTVENIVAEGLRYGETPKGLVSFHRYGDEVRKAVEEHLVEGAQYAAAGGEVKIHFTVSPEHLTRFEALLAEKIPGYESRFGVKYRISFSVQDPSTDTLAVNPDCTPFRRADGRLLFRPAGHGALIGNLGKIDADIVFVKNIDNVTTDARRSDTVLYKKALAGVLLALQERIFEYLMALEVPGAELEPIAAFIENELCVKLPKDYGTALLRQVLDRPIRVCGMVRNEGEPGGGPFWVAGADGLETLQIAESNQIAPEKRELMRSATHFNPVDLVCSFRTSKGGRFDLREFVDPATGFISRKSDGGRELLAQELPGLWNGAMARWNTVFVEVPITTFSPVKVVTDLLRPEHQGDEFMQSKNIKNKLNNIFSVIFLLFGLAACSDDRYQTQNVTHLVIDSFEDFAKDSDTVSIRSITLSLADKRFYAEFEHSDIEINYEVNVRNNSADTVRINLPDSSNYATYLNNRVGWLSGWNKNELEILPCRSNTICITNIGMFGALYRWEKLFPPKHDYTFDMLKILPDVKVYYNGQLVLPSKEIEIFTSDYKDPWIYKVLKKISGEPYAIDFSNMIDRLLKSKLKDNILWFDPKKNAPNMRGLKWILYICRNMENKLQQLTQKLYDEGLEKGRAEAERLVAEAKTNAAKIVKEAEAQAAKILAEANTKAQDVEKNAMTEISLAGKQALSKIKAEISSMIIAKSTAPAVKAATLDPEFVKQMLLTVAKNWSGADSSKNQLKALLPEAEQKAFEATFEAAAKELLAAGVEVGYSKEVRTGFKVGAKDGGYYISFSDQDFDALLKEYLRDKVYKMLYNAMFDKNYYCLVAGLREYSLDADTKGFNARAIIEEILEGVSARDARCVRLLYGYYDCENLVNFRKGRAAHNPLGNLSREEIEEQTKNPDRLPARMATVVRSYSAIVDEDADNEDGIDTDRSFENALFSAYYDECAHSKSRFLRQWADFDRNLRNISAAVVARVTGRSAEQSVVGGDETSQQLKRSSAADFGLRGDVPYLEAVIAAVNDETNLVEKERKIDAIRWNQAEELSTFDYFDINALLAYLVKVNIVARWTRLDDKQGREMLHRLMTSLDGKDLINKQMKTTGRVNGIISNIVIVKADGPVGQNEICHVYCGDTKMMAEVIKVVGDNAYVQVFDSTRGLKIGEKVEFEGHMLEATLAPGLLSRNYDGLQNDLEKMDGLFIARGSITDPIDFEKKWEFKPLAKPGDKVSAASWLGQVKEEWVEHKIMVPFTMEGTYTVKSVVPAGEYKVTDTIAVITDADGRDHDITMVQRWPVKQAVRCYREKPRPSRVMETGVRAIDTFNPLAEGGTGFIPGPFGAGKTVLQHAISKQADADVIIIVACGERANEVVEIFKEFPELVDPRTGHKLMERTIIICNTSNMPVAAREASVYTGMTIGEYYRSMGLKVLVMADSTSRWAQALREMSNRLEELPGQDAFPVDLSAIISNFYARAGLVKLSNGKTGSVTFLGTVSPAGGNLKEPVTESTKKAARCFYALSQGRADSKRYPAIDPLESYSKYLEYPEIEEYLDTRIEKGWVEKVYTGKTLVQRGKEANDQINILGDDGVPVEYHERFWKSELIDFVILQQDAFDEIDANCPIERQKMMYEMVLDICDREFGFTGFEECASFFKGLINLFRQMNYSEWKSEKFEDYRRQIEKTVSEKESKMTTRAFQKIYTKIENITKATVTLRAEGVGNDELATVGGKLAQVVKIMGDQVTLQVFAGTEGITTDSEVIFHGEPPKLRVSDNLAGRFFNAYGEPIEGGEQIEGEAREIGGPTVNPFRRIQPSELIATGIAGIDLNNTIVTGQKIPFFADPDQPYNAVMANVALRAKADKIILGGMGLSNDDFLYFKQVFENAGALDRIVSFVNTTENPPVERLLVPDMALTAAEYFAVDKGEKVLVLLTDMTLYADALAIVSNRMDQIPSKDSMPGSLYSDLAKIYEKAVQLPNGGSITIIAVTTLSGGDITHAIPDNTGYITEGQLFLRNDSDTGKVIVDPFRSLSRLKQLVIGKKTREDHPQVMNAAVRLYADAANAKTKLENGFDLSDYDERALKFAYDYSEKLLAIDVNIEITQMLDTAWELFAKYFSKEEVAIKSELVEKYWPKTEMAIKFQYNKTSLGELGKQLKMRQKALPTIKSKESALRSEVKKAKDTAQDFRRQLDALTAQYDYMVSLWGEFDADLLRIADVDLAEQKIAGVRTPVLQDIRFEEKDYDLFSAPVWFADGVDILKRLARLGIEFEVFNRKMELLDFARRKTTQKVNLYEKVQIPGYEDAIRKIKRFMEDEENLSKSAQKIVKTKQQQAGEGAMLMIARMSKYDLVLYAGQSSDFIEKLRGLGLVDITTTGWEPSDEDRQLLLTIDNHHKAVETLKRFLEDERFVKDEQPIADGGEAFDRYMAATQQAAALRSEIARLQKTADELRPWGDFSVDTLRKLADKGVVLRYFFTSRAAYEKDIEAWSERYTIALVHEGETFDYFVVVTRPGEEVVLDAQEVKAPTMDCRQAEAQIAEARRKLAELDREFSRAALSVEVIRRHGIELKRKLEEIRVKNTAQPEADGTLVILEGWAEESDSAKVDALLAEYPNLIFLKSTPTPEDNTPVKLRNRPFAHLFEVIGAMYALPKYGTIDLTRFFAPFYMIFFGFCMAEGGYGLVIMLGGLAAVMLGRKKGSSAMKEIGMLTMLCGFSGMVFGLMSGSFFGLQLSEWEWLGSLRDHLLTPDILFPLSIGLGAVQVLFAMMINAYVTARSFGLRYALGLIGWIIVLVDSAAAFLLPESVGFTFHSVAYLVILGVGLVLMFFFNSPGKNIFVNFGLGIWNTYNNVSGLVGDLLSYIRLFAIGLSGGILAMVFNQLAVGMSPDIPVVKQLVMLLILLLGHGINLFMCVLSSVVHPLRLTFVEFYKNAGFEAATRVFTPLKNEMEPITLGYLGMAIMFTLAAVGSCYGTTIAGNAAVGAMKKNPNAFGNYIILSGLPASQGLYGFASLFLIMNYLTDSVTMLQAAAIFGLGILVGLVNFFSSYRQGQLCANGIAAVGNGHDVGTKTLILAAFPELYGILTVAITFLVTGLMKMLFLLVLALTGCLSEEIPTEKETTLVRVGEEAPHFTVGMLDDTAITLSDLQGNVVLLTFFSTWCPTCRKQMQQMQTQIVDRFADRKFRFLPINRGETQQTVQEFCRELGIAFSVGLDPDMSIYSLYATRYVPRNFIISPNGKILLSETDYDATIQRLLIEQIEQALQTTEMIREQTQRTAGTGPNRAEEIYEKCLKRDPLTAEEAYWLYEQAPLQELALTADRVRRAVVPDLEVVTWQIDRNVNITNVCISGCHFCNFHCKPHQTERAFITTLDEYKEKIERMLALGGDQLLLQGGLHPKLGIDFYEELFSTLKSLYPQVRLHALGAPEVAHIARISGLTTLDTLKRLIAAGLDSLPGAGAEILDPGVRKAISPAKPSVEEWIQVMHEAHCLNLPTSATMMYGHVETSRQRVDHLLRIRDLQARCPEGHYGFLAFIPWIFRSSGTELERQGVATRFSPLEYIRIIAVSQLVLNNIRNIQASWLTVGKATAQVALHSGANDMGSIMIEENVVSSAGAHNQFDAAGIQQAIREAGFTPRLRDQLYRMRMNKLKNTKKSAAFDRSSLIINLFREFPNNKFSLKHLASASGGATKEGRLRTREIITELLAQGTIEECGQEKYRLSGKERPRQEGIVQMISTGAMYIRSEEFENDVYVSQRNSLNALDGDRVEFVITRRSHAGSLEGEITRIVERSRKQYVGTADVSDHAIFVKMDPRRMPMDVYLSKRDNPNVQHGDKVVIRITDWALGSKSPAGELVEVLGRAGENNTEMHAILAEYGLPYHFEQKVEDAAQAIPSTITKADYAARRDFRKITTFTIDPADAKDFDDALSIRKIEDGVWKVGVHIADVTHYVQPRSVIDTEAEERGTSVYLVDRTIPMLPEKLSNELCSLRPDEESLCFSAVFTLNEEAEVLDKWFGRTVILSNRRFTYEEAQQIIETGKGDFAEEVLTLNRLAQRMRKTRFKRGAVSFQREEAKFKLDAEGKPLGVYFKEQKEANQLIEEFMLLANKQVAEFCGHHKVNGRAVRRTMVYRVHDVPNEEKLEKFRTFVLRFGYVFKADKGRAVAKEMNKLLGQAKGRIEENVISNLAVRAMSKAFYSTDNIGHYGLAFPYYTHFTSPIRRYPDMMVHRLLARYLEGGKSADRDTFEKLCVHASEREVIAAEAERASIKYKMVEFMQDKIGQFFDGHISGMSDWGMYVELDETHIEGMVSLREMEDDLYQFDENRYEVYGRRKGRIFTLGDAVRIRVKRADLQRRQLDFELVHDAAADSREDDVKGHAAIPVRRQSTSRPGKGGKTSRKGGKKGSKRMTPVEFRRHLHRHPELSFRETESARFIAEALREAGIPCRPIAGTGVLAKIEGRGDLRRAVVLRADIDALPIREQSGAAWSSENDGVMHACGHDIHAAVLYGTLLRLSAERNFEGTLFGIFQPGEESNPGGASKVLAENPFEGYTVLAVVGEHVEPALDAGTLGFRAGKYMASNDELRLTLEGAGGHAAMRAEHRDTVSAAAQLILHLTALNTPERVVSIGKVEAAGATNVIPDRVYMEGTMRTFDERERAEVKRRIEELAAANDASYGIRTRVHFTPGYPCVVNDPELIRQAVALAETEGIPFQMLPLRMTSEDFGFYGTRYPAIFYRLGVGPGAGKLHTSTFNPDEAAIPTGIRFMELLARNYFNRMNITDLIQGAVASRTTRFAFELLPPLKGDGTRSVFGAIDPLMDFNPAYINVTFHREALKEDIRPDGSREWHIMRRRPGTVGISAAIRRKYDVEVVPHLICGGWSKYDIEDSLIDMDFLGLHNVLALRGDKRQNEPRFVPYAQGHAHAADLVRQIQAMNRGEFIDGEVEECHHSKFSVGVAGYPEKHFEAANAQSDLQYLKEKVDAGADYIVTQMFFDNSKYFDFVERCRKAGITVPIIPGIKPISTPKHLEILPRTFSVSLPEELVKAVRACGEDTQAAREVGIEWAIHQAKELKAAEVPIIHFYTMGRTDNIRKIARNVFMTKNRDIRHELEHRILLLDGGFGTMIQQYGLDEADYRGKEFAASEKLLRGCNDLLNLTRPETIREIHEKYLQAGSDVITSNTFNANSISLADYGLAAEAYRINRAGAAIAREAADAFTARNPQKPRFVGGSMGPTSHTLSMSADVDNPGARAFTFEQLSQAYYNQARGLMDGGADLLMLETVFDALNAKAAIFAIESLFAERGMRLPVIVSGTLTSSGRTLAGQTIEAFYTSVAHAEPLAVSLNCSFGAKALLPYLERLAAVSEFRVAVYPNAGLPNVMGGYDETPAMFAADVEEYMRRGLVNLVGGCCGTTPLHIFELAKIVNNYAPRPLPQRRHVTCLSGLEQLRIVPEANFVNVGERTNVAGSAKFARLIREKNYEEALSVARAQVEAGAQIVDVCMDDGLIDGPEAMRDFLNLMGSEPEIAAVPVMIDSSKWEVLETGLRVVQGKSVVNSISLKEGKQEFLHRARLIRRYGAAAVVMLFDEQGQADTYARKIEVAQRAYKLLTDDGFPAEDIIFDPNILAVATGIEAHDAYARDFIEAVRWIKQNLPHAKISGGVSNLSFAFRGNNAVREAMHSVFLYHAIQAGMDMAIVNPQMLQIYSDIEPELLERVEDVILCRRADAAERLTEYASQFTKTAATQTQHTDAWRSEPLGKRIEYAMLKGVADYIEQDALEGYRTLGSPLAVIDRLLMPAMEVVGNLFGQGKMFLPQVVKTARVMKKAVAVLTPYIEQGSEANAKSAGKVLVATVKGDVHDIGKNIVAVVMACNGYTIRDLGVMVECPRIIDEAVAWGADAICLSGLITPSLEEMIHVCEELERRGLQIPVLIGGATTSDVHTAVKIAPTYSGPVIHADNASRNNKILGELLGPGREEYLARVREEQQTLRDQYRRREEIRTILPFGQVRKLRVPKPASEIAVPAHTGRLVFPDISIADVEPLIDWNFFFPAWGLKGRVPEIFENPEHGAEARKLYDDAQKMLARIREEKLLTLQGVAGIFAAVSRGDDIVVTGPKDKKYILPMLRSQAPVREAQARCLADFIADEKAGRTDYIGAFALTGGIGLKELTEKFRAEGDDYNAILSKLLADRLTEALCEWVHIFIRRQMWGYETGPALTPEQIIRSKYRGRRMAFGYPACPDHSLKREVFDLLAADKTTAMRLNDNYMITPEEALCGLFFADAEYFSVGRIDREQLADYAARRNMDIETIEKLIPNNIMTKIAWIGLLAMTLAACSGRTKTLRTETPAATPAAPRTYTYRVIESYPHSTDSYTQGLLFADGVMWEGTGEYGHSRLQRIDLETGRTDVVATLPRSEFGEGIALLDGKIYQLTWENNKAYVYDAATGRQLRTFAYAGEGWGLTTDGERLYMSDGSEYLRILDPETFRVQRSVPVTFRGAPVQLLNELEWIDGKIWANVYVTDQIVIIDPASGIVEGVIDLRGLLPDEEIAPDTDVLNGIAYDAASERIFVTGKRWSKLFEIEIIPQMDSVSFVCCPAAALAVYSRYVLIIIGNKDSYFSEKDVDFGARITDRRGCRSGCFSPKPFLKEKRIGAEIFIGCLLLANELFCTFADPNCNVMNIVREQREQNNSLIKVTVGEKDYGDAVEKSLREYKRKANIPGFRPGMVPMGVIKKMYGKGVLAEQAYRQASEAAFNYLQEQKIDYVGDVIPSEEQGDFDFENGTEFEFIFEIGEAPEVKLELSAKDKMTYYTIKVDKKMHDDYRSNFLRRFGRLVDTDKVTADEALEVTLDNGDMKIEGAYVGLISMNEEERKPFIGKKVGFKTQVNVNELYKTPAQRAAVLQVKENELEGIKPEFSLEITKIRKFAEPELNEEFFKMAFPAGNVKTAEEFEAFVDAEISKELRRESDYLFTLQLRDFLLKKAGLTMPVEFLKRWLYVINEGKFTKEEIEKDFDAFVKLFTWNYLQKYFIKQDNLTVTPEEATAEAKALAQAQFAQYGLPTAPEDMLANYAKKILEDREQGQKIYEKLYEMKVVEDVKSKIKVTEKAVSAEEFAKLAKEIMPGGVFFKFIHNRTVCKLIKNIGSRFKNFSATCLRSYSISRTRPTHDAGSNPAKTREEAKNRSMTTKQTLREMNEFEKYATRHCGINSLKLHDFRSQYAAYVSPTIIEERQLNVATMDVFSRLMMDRIIFLGAPIYDDAANIIQAQLLFLESADPEKDIQIYINSPGGSVTAGLGIYDTMQLVQPDVATICTGLAASMGAVLLTAGAAGKRSALPHSRVMIHQPLGGAQGQASDIEITAREIRKTKQELYEIIAAHSGAPIEKIEKDADRDYWLSAREAKEYGLIDEVLTKRGMAKNYGEDLYGNESDACSFCGAKRRDGAILLSSSKGCNICSKCIAKGYQMLIENDVLHDEAASRRKEQKNTSLKFEDLLKPNEIKEFLDQYVIGQDDAKRYMSVAVYNHYKRLLHASGEASEVELDKSNILLVGPTGTGKTLMARTIAKLLNVPFTIVDATVLTEAGYVGEDVESILSRLLQVASYDVELAQRGIVFIDEIDKIARKSDNPSLTRDVSGEGVQQALLKILEGTVVNVPPQGGRKHPEQQFVQVDTRNILFICGGAFDGIEKKIAQRLNTRAMGYGRMNADSVDRNNLMQYLMPQDLRSFGLIPELVGRLPVLTYMEPLGREALRSILTQPKNAIIKQYEKLFEMDGVKLVFDDEVLDYIVDKAIEYRLGARGLRSICEAIMMDTMFDIPSSGERRFEVTLPYAREKFEKKKFLALKQVGMRKEGRKIFGFVLRFHIFSAGNGPSCAYSADSSGMGAECRPGLMVTKSELTRVADNIRILSAAMVEKAKSGHPGGAMGGADFMAVLYTEFLRYDPDQMDYPFRDRFFLDPGHMSPMLYSTLALAGTYTVEDLRNLRQWGSVTPGHPEVDVLHGVENTSGPLGQGHAMALGAAIAERFLAARFGEWQSHKTYAYISDGGIEEEVSQGVGRIAGHLGMNNLIMYYDSNNVQLSTKVDEVDTENVAMKYEAWGWNVITIDGHDVEQIREALTAANAEKERPTLIIGRTVMGKGAVAADGSSFEDKVSTHGQPLTAAGADFAATVRNLGGDAEDPFKIFSESGKVFDARREELREWVRTQREREKTWRSEHKELSRKLDLFLSGKVPEMDYKGLEIKPDGATRAASASVLSFYAERIENMIVASADLCNSDKTDGYLKKTKAFSKGDFSGKFFQAGVSELTMACIANGMALHGGVIPACGTFFVFSDYMKPAVRLAALMHLHVIYIWTHDSFRVGEDGPTHQPVEHEAQIRLMEHLKNHRGERSMLVLRPADGEETVTAWKLAIEEHRPVALILSRQNIKNLPALNHSRREEAAQLSKGAYIVVDAAKPAVVMLASGSEVATLVEGAELLSKEGIAVRIVSVPSEGLFRDQPKSYQQTVLPQGVVRYGLTSGLPVTLLGLVGENGMIHGLDHFGYSAPYKVLDEKFGYNGQTVYEEVKKLIGKMKVRNYPRSCKFLLGGTFSQPLAVRAGKACRPEQVRRPAVPGRDSLLSGEKRRNGFGCFVVSIAGSVNSIPACVVSGRIAANPSFRRGVFRFFRRVGKKSSDRTTPIWPTKAYGMARNVRLVVFLRRKPGGMETFIVKRDGTREAFSMEKIQRAIAKAFLSVGSFATQDVITNILSRVSVTDGISVEEIQNQVEVALMAERYYTVAKAYMLYRQRHTEDREVRDKLQFLMEYCDASNAATGSKFDANANVENKNMATLIGELPKSNFIRLNRRMLTDRLKEIYGKELADKYIEMLNDHFIYKNDETSLANYCASITMYPWLIGGTISIGGNSKAPTNLKSFCGGFVNMVFIVSSMLSGACATPEFLMYMNYFIGQEYGTDYFKRADEVVDLSKKRRTIDKVITDCFEQIVYSINQPTGARNFQAVFWNVAYYDRYYFESLFGNFLFPDGSKPDWESLSWLQKRFMKWFNRERTRTVLTFPVETMALLTENGDVKDKEWGDFTAEMYAEGHSFFTYMSDNADSLSSCCRLRNEITDNGFSYTLGAGGVSTGSKSVLTINLNRCIQYAARKGMPYQFFLEEVVDLVHKVQLAYNENLKYMQSKGMLPLFDAGYINMSRQYLTIGVNGLVEAAEFLGIPINDNPDYERFTQEILGMIEKYNKKYRSKEVMFNCEMIPAENVGVKHAKWDKRDGYKVGRDCYNSYFYIVEDESLNIVDKFRLHGRKYIEHLTGGSALHMNLQEHLSREQYRHLLRVASQEGCNYFTFNIPNTVCNDCGHIDKRNLKACPKCNGRNLDYLTRIIGYMKRVSNFSQARQQEAARRHYATPGQLMFQEIPGEVTLALNLSGCPNRCAGCHSPHLWEEVGEPLDDNLLNSLLSGYGNAITCVCFMGGDAAPGDVAHWSACVRAATGGRLKTGWYSGRSELAAGIDPRSFDYIKLGPYVAHLGGLDSASTNQRLYRVTDGEMKDITAELRNRDRMLLGMGFLFTSESVSEGHPDKVSDQISDAILDEFLRHDSNSKVACETLCTTGLVVVAGEVRSSAYVDIQHVTRRVINRIGYTKSEYQFDGNSCGVLSAIHEQSPDINQGVVREAEEEQGAGDQGIMFGYACNETREYMPATLILSHVILKELAVIRREGQVMTYLRPDAKSQVTIEYDEQTHRPLRVHTIVVSTQHDDFIPTSKGVTEKMAEKRMQEKIREDVRTILIPRVKARLERAKDKLARLIGDDYILHVNPTGKFVIGGPHGDTGLTGRKIIVDSYGGRGAHGGGAFSGKDSSKVDRSAAYAARYIAKNMVAAGIADEILVELSYAIGIAEPISVFVDTHGAVCSRNPKLADMTDGEIARRIAKLFDLRPAAIVKKFGLKNPIFEATASYGHFGNRPYTRKEKVWEDGREVEREIEFFGWEKLDAVDLIKQEFGLMKKALLLLGMIAAGAASGGVVAWSILSPAEKNGTHVVTPQSGAVSDDPFSQAGTHFTSYQAEQYPDLTYAAENAVKAVVNIEVVQEIEVPERQYDPFFEFFGIPQQGRRGPSTQERRGGGSGVIISADGYIVTNNHVVDEATRLRVKLSDGRTFDAKVIGTDPTTDVALVKIEAEDLPTLPFGSSDSLRLGEWVLAIGSPYNLQSTITAGIVSAKARQLDVIPSEFRIESFIQTDAAVNPGNSGGALVNTRGELVGINTVIKTMTGSYVGYSFAVPETIVRKVVVDLKEYGVVQRALLGLAFRPIDQNFIDQMGEETGIEELGGVYVASVSEGGAASQAGIRKGDVILSVDGVELNEAATLQEQIGKHRPNDKVKLMIKRSGSMKQIEVTLRNKAGKTELLTRDDVDVMEVLGGKFATADERLCRRLEIRGGVEVLAIKANGILSKARVRPGFVITHINDKSVRSLSDMQRMTDKVRSIDGVYPDGRSASYVLVEMRQLKITKSITNRESASLDKYLQEIGKEELITVEEEVELAQRIKKGDQEALEKLTKANLRFVVSVAKQYQNQGLSLPDLINEGNLGLIKAAEKFDETRGFKFISYAVWWIRQSILQALAEQSRIVRLPLNQVGSLNKINKAFARFEQEHERTPSPEELANELELPKEKVTDTLRVAGRHVSVDAPFADGEDNSLLDVLVNPDSPNADRGLINESLSTEVDRALETLTERERDIIKYFFGIGCSEMTLEEIGEKFDLTRERVRQIKEKAIRRLRHSSRSKLLKSYLGMLQPLKITLVICYTVLVLSVAGVLLSGILGRLEWLALCAVCALALLSITLVLGKNLRIQRMMTEDEYSDDRMDVKIASDWKEILSEEFEKPYFRELTDFVRQEYASRRIFPRGSNIFRAFDKCPFDKLKVVIIGQDPYHGEGQANGLCFSVADGVPFPPSLQNIFQEVADDTGSPIPTSGNLDRWAEQGVLLLNAVLTVRAHEAASHAGHGWETFTDAVVRAIAQRKQGIVYMLWGSYAQRKGAIADPQRNCILKAVHPSPLSAYRGFFGSKHFSRANEYLQSIGKAPILWMLVLLSAAYAVGIGGGEVARKLDLRPSQIVPAADTLPVRNLIYLIGDGMGLSHVSMLMLEEGYGTTAFDRAQNIALITTYSANNRVTDSAAAGTALATGHKTGNGMLGVLPDSTAAESIMADAIRAGMPAGIVVTSTLQHATPGAFYAHVPYRRQYQRISDQLAGSDLTVAFGGGLKYAEASEREDGVPGIERLRDRGFRVLTDPSQLDTLSRGPVMGFFADGHLPKMSEGRGDYLERAIRKALEILSREAGERDRGFILMVEGSQIDLRAHDNDAEGVLAEMRDFDRAVAAAMDFADRHPGTLVVVTADHETGGLSIPSADVDFEHEEAGIEYRFSTGGHTAAMVPVYLYGTGAERINGVLDNTELALRLAGTLGLRMRKLFLLAAGLAMTLTACQKDEVSPSAGATSQTITVSIPQGVQTRAAAADFGDGSQIDRCLLQIYRNGQPYGEQQTATVTGNTATFNLRLVAQQKYDFVFWADCSEAGYETDDLSAITLGSDADYTGNDDKFDAFFLCKKDYTVTESFSETFTLRRPFGQLNVKTLDLAAIPDNAADLKPAKVKVNFTSLPNTFNALTGEESGEAAVEYTADVLNATGELTVDYIWAPVEQATLADFKMTFLDAAGKEISANSDFKSIPIRRNYRTMVSGNLLTKQGDITVEIDPNFYKPDITVVTTAEELHAAFANGGSVTLSEDVTVEAPLVVETGKTVEIDLNGKDIINTTSLPDTDPRYGNTTVFEVKGGATLNIKGDGNIKAIGTKPNEDGYRMAVYAYGDAKVNIYGGNFVNDQDYNDHNAQLDLIYADQQAVINIYGGTFESKSANNRGYWVLNLKDGSGAAINVYGGTFINYDPSSSMTENPVKNFVAEGYTAIKTSAEPAPNGTYTVVKGTEVAAPADLESALKSGDIAIVSRSMTIDDSPYISSVASATLSLKEGAVLTAQEGSELQQCIQVSKSCKKMVISGKGFIVGPKNSTATNVAGIYSGCPDLVIDGTITVDGSSGSKGTNAAIRIAEGTTTIKDGYFTVGTDASGIANSCILVATARPSQKAHLKIYGGVFETKGNPINGWYPVINIQDADRKAGRATVEIYGGIFINYNPATGDNTGEADDTFVAPGYKSVETTYNGQQAWQVIPEMKKLFLLAVGLAMTLTACQKDEGLVSDVATTSSFTVTIPQSGVQTRAVTDAFGTGTSVNRCILEIYHGDKLYDRIEKGVSGKTVTFDNLRLVSSQTYDFVFWADCAEGSEGNFTDKVYNTANLKSITEIGPFVGNSDERDAFFAKESFKVTGSFTKPVTLKRPFGLLVVKTNDLNEIKDEALKPTGYSVAFKGLPTTFNALTGEVSGSADVTYTAGELAKADGTISMDFLWATESEAALSDFTMTFLNNGTAICTNDAFTNIPIRRNYRTNVSGNLLTKKGSISVTIDPNFDANSPIDKVIAEVESVSEVAQAIENGATDITVTTAPTTAATIEIPHTLTAEQAAKEISITLPETDQQVTLAYTTEQNGQAPEAVNITVPTTNKLIINLPESTVTLNGTSYTAVEATTAGNTLIVPEGVTVGKLNVVKGNVEIYGTVTEITFGKGAGTVTTYATGDVATLKKAIELIAQGKCARIVLTADIDLKGSADNPWTPIDTEGKGFVEFDGAGHTIKNLYVDNATGQPNGKGTYYGGFFYVLQGNVKDLTIDGAEVTCYRGGTLVGRMDYGTVENCHMKNTAIKSVQKIGGLIGFVSTSSKDVTVRNCSVTACSIDVFNPETFTYCSQAAGLIGYFQTFERNVLIEGCSVSGITLNNTYKGQDADSYSDGDLFYAMEQSFSHAFIGNMVNVSKKADTYDKYTVELRNNKVDKQADGVATGYFTDEYMGWRASNFTAGYISTAKLIVDGVVKDRWTELKRFVALLKDGGNVNVWYHYDLTKIPETSGEIPIEKPTVIDFKRAVTLTVGKQQIVNKKELTVKGIGKMTASDYIFMNEQGATLTVEGGTFTATKATDANGVVIYNQGICNIKNGTFDGPGFTLMNTGSADMTIENGNVINRNSPTGYALMAAGGGTKLTVKGGRIEAIQSIGGANVTISGGTILNDCKYYALYNQNGKTTITGGYFSGYPGMKDVYIADGTVAIQGGYFEDNQTAAADGYVYKDNVQTVDGITYNYEVVAQMKKIVTILLFALTVFAGCSKDEKPTPAPTMPVNGVIYLHSESVLKNEPAAKAATRGATAAEQTLTYTFEAWTNDTKPRCVLHKIANGTLDEAAIEIALVPGTYDFLFWADYGKGTYTTDNLRQVSLTRTPYTPGSGRDAFAFALPGVQWNGGNGVSATLKRPLAKLAMQNTAAFGTGGQEVSVTYTNVPTQYDVLTETTSAPQTLTLAFPATTAGSNSVGEDFLFVPYAGQSIGLSITVGNVTKGLDMLQLQQNYTTHVTATFEMKRITIYIAHLLVLVLTGCDKTVLEFPENEGVDPTLVNANLSLAIDPKIEPYEQTGRSEGEVIDAYDVRWIVEVFRDEIGGELAERRVLGCEPAADGHHTIHTSLALHAARYHVVAWMDYVDNGSVDDKYYTIPSLSSISVPAAGNYIGDEDHKDTYVARQEIDLKAHRDRWNETVDVTVTLQRPMAKIEFIATDIDKFLDELAARHSEITGSVADDLLSQTPDLSTIRVQVDYAGYFPSGFNAYTNKPNDARTGMWFECNMTPLTNKEAHLASDYIFVNGSESAVKVDLTIRDSEGNLLNRIEGIDVPIVRGKLTTIRDEFLTRDYAPGIGIDPGFDGDINITIPDMFPRLFLLGFLLYGLNAAAQEPDSVLSAKASKSTRQKTSVLASEKQDTVVFRFAPKRRMFWADYKGNAAAINSLTQSIRQHKLSIESGDMKVRMLGFCSSYDSFKTNLAAAKNRSNQVKSYFIVHEGLKEEHFRTTNSTQRWRGMTDVIAVAYVFRSAGSNQMPEPESDVMPVDSLSGSEAEPTSEKPVIESACNPVSEIPAEISAEPESESTQSVVEALEGMMFDPVRPLYRWAIKTNVAYLAATVANLGVEYSFGDHYSIDLPIIYSPYTVARDYRLRFLAVQPEFRYWLKAPMKGHFFGVHLNIGAFNIAVDNKNRYQSPDGFYGVGLSYGYVLPFARHWAAEFTVGAGYVHTKYDTYYNIPNGARFEKGRAYNYWGLTKVGINLLYRFGKMCKQLKKVMAECGIEKQISYHCARHHHLSYTLKISSLDMQVRFGGRYGKTYCRKAVRRSVPSLREATGGDLVELAKYICRTDCVSEALAYIERLVNGASLPRTRMLTAPPRPVEAEMKDVIVIPLRHHALFSYLQSRLIDADISRMYCKEVHYELRGRHYFALAFGNISGGYEVRNAYYKGCLNNKDISLIRHLTEETQENVCVFEGFMDFLSYMTLKLAGDRTVCLAIPCDYLVMNSVNNLKKTLARLQEYSDIHCYLDNDLAGQRTTETIAGMYGGRVSDESCHYAEYKDLNDYLRGKKRMKLTQISLTKQMFNAQLFYGFIFRAFLCKIILIRIFNIHTKYMNSYFIFAIVLTVAYIIYYAVIIAHDLYGKKGTDKPDEEVFDLGAPEEEESVAVTESESGFSIGSENYETESTATSSETSPEEDIKDKPGTAQEKLERLKAEAEEQMEETTPYLSDARTSEEMYKAMISKGRLDNRPEIKWNPIQDRLMSKAKKILCALCLPFPYTAFAKSGSVNYSWGADALATMHDFVVTMMLYVQYICCTIAGVYVIVSVCQIYIKMNTGEDGITKSIMTLVGACLFLIGAFYVFPAFFGYRIMFQKTKQLCRKAFGFVNGIPTKVMMFSFMLLSGMVAKAQNSAGDYSAGTSALSTVADEIAKYVPIMVKLCYAIAGVVAIVGAISVYIAMNNEEQDVKKKIMMVVGACIFLIAAAKALPLFFGIAAMKSKDERYPDYPLFKGLQRPLEFLGIQGRYIYWAAVTTCGAIVGFVAAYCLLGFIAGLVVLATVVSVGIVLILLKQRKGLHSKKVAPGVYVYAHSRKIMTLYIILCFVALCAGMALSVYAFGTGGKRKRIFQDIYFSAEETDGVGVLYTKTGEYSAVLKIENPVQKYSADIDSYYDFTHLFTALAQTLGEGYAIHKQDIFVRKQFASEPADGQEFLSASYFRYFKGRPYTDSLCYLTITQEAKKSRLFSFDNKKWRDFLVKIRKVHDQLHDSGVQARFLNKAEASEYVDRYFAMNFKDRTVSMTNFKADDETVSMGDKRCKVYSLVDVDCAALPSMIRPYTNIEVNNTEMPVDLASVVDNIPDAETVVYNQVIFLPNQKRELAMLDKKKNRHASIPNPNNQMAVEDIKRVQEVIARESKQLVYTHFNMVVAVSAGADLQKCTNHLENAFGRMGIHISKRAYNQLELFVGSFPGNCYTLNEEYDRFLTLSDAAMCLMYKERVLHSEETPLKIYYTDRQGVPVAIDITGKEGKNKLTDNSNFFCLGPSGSGKSFHINSVVRQLHEQGTDVVMVDTGNSYEGLCEYLGGKYISYTEERPITMNPFRINREEYNIEKIDFLKNLILMIWKGSDSQIPEIEFRIVEQIIIDYYDAYFNGFTRYTDEQREVLLKNLFAAASRKNPNKPPREVDEMVRKQIEVLEARRAALKVTELSFNSFFDYSFDRLEQICTENDITTISYSTYSTMLQPFYKGGAYEKILNETVDSALFDETFIVFEVDAIKENKKLFPIVTLIIMDVFLQKMRIKKNRKVLVIEEAWKAIASPLMAEYIKFMYKTARKFWASVGVVTQEIQDIIGSEIVKEAIINNSDVVMLLDQSKFKERFDEIRKILGLTEVDCKKIFTINRLENKDGRSFFREVFIRRGTTSGVYGVEEPHECYMTYTTERAEKEALKLYKKELRCSHQEAIEAYCRDWDASGIGKSLPFAQKVNETGRVLNLRPVYESKMKRLLLILTIASVALCQTVHAQYYSVNYDTRTVAAMVAAFGTEAVAEGYYREQVDDILKHYTAAEVATAGIFAAKFLEHKALSDLGIWNSRTENYYYRRIYRMVAEKIMPKIWVVAKQMLHSPQTAIYWGSYLMKVCDDTKSLCMQFESVVTNSTLTFSDIAFLEINPEIAPLLKLSETGNIDWQRMMDNFAHIPGNFTHENLKSDLDNLYNTGVGLATAGIANLGDALLQSSSFHDLMGGKVEEIGNLYEHYGSLFEQAEHDIGGLLIDMVGGPDNVAGLFNFSNYNLTAWMTDYLDEAMGNYYTQRWYIARRDQGSVSLCDYYPPTDDNSILNGGAWVRFNTSDPNFYPNASQREQVLANSEGYAGWSRNRVQQLNNQNDGFSYSINYWMSAYIISKKNKQTKKAYAYEIHVSKSWNKEEVVYEEVFDSYSMDLNTFRAQLNVRLAEFNENEDGYTYYISSGTRNYYQATDAAKLKGCESVTISVTCSDGVTLGQGSTQYKCRKCGSSLNAHTKECAMQTSVTENNLDLSELDALLNEANSQAANLEAQIGTLENENAVLLKKISTASIEDAAAYRQQYNANKTRIDRLKGELAEWKKKQSDYAQAKSEAADDNSVATDDYYRIPAIMQDCKAAYGLTWQDGGSWNGYSYVRKATMPNINGIITFKATVSIARKPKYFLGIKIHRAIIQIQWELTSVYTDTHVADVLTLDPGLSDAEKTKLVNDRIAEIAREHPSCKITTEYARSTPLEETPSGDVYHLLWSSDRLEIAREVDSRITRIYADLVSLEKMMHYKRSILDVMKDVLPGLDTDEGRRLTLVEECHDRWVESARTFRNDGGRNGGKEVRPMKRILRIAALLLFLLPGIAKAQWTFDIVSVEAYINDHKKQRSLLLARSTLEYSNKLLHEYSCKEVGGYKELNIDLDRYTRAFDVIDVMYQSLRTVLNVKNTYTSVSDRIGDYKSLLEDFNAKILKRGRIESADTLIISINARGLRAIAREGEQLYKSVSDLVLYATGAAACSTSDLLMVLEAINRSLDNIERHLNRAYFETWRYIQVRIGYWKAKVYRSRTMREILDDAFGRWRGAGRLDYMAVAVTVTTAVHAQYVTYNHDSPKQNQVTVMETGTGALSPDLYYSVLHNKYKKSAAAKNKLSFRTLAGINLYNQVDEAEAIDSALVKRAKVEALNVADRQVDIAWLAEGDKVSGQMERFRRNIDRILLSGGTPADKERWTEYYHVYQCAIKATKDAYMPNAQRKKEYLRIYEDVARQNEILVGYLAKRQNATVTNALLNATDNRTLHKGGIVRNAMSRWQESRLAVRGSQSGSNGNGEDDNESVNRGKMANGDILSDFGINLLEEEIDDVIFQTNEFLTDATFTGAQGPFWWILQMCMALAALFSIVMAAGIAYKMMVKHEPLDVMKLFRPLAVSIIICWWYPPADTGMAGSRNNWCFLDFLSYIPNCIGSYTHDLYEAEASQISDRFEEVQQLIHVRDTMYTNLQAQADVAHTGTSDPNLIEATMEQTGVDEVTNMEKDAAKLWFTSLTAGVIVGIDKIIMLIALVVFRIGWWATIYCQQILLGMLTIFGPIQWAFSILPKWEGAWAKWLTRYLTVHFYGAMLYFVGFYVLLLFDIVLCIQIENLTAITASEQTMAAYLQNSFFSAGYLMAASIVALKCLNLVPDLAAWMIPEGDTAFSTRNFGEGVAQQAKMTATGGLGGIMRMKLQEKIKSWCKDEKFMSFAQERARKEVCEVAENHRIDPQYEELDEAFEYDDRYIAPLVTYLTYKLRLALLQRNAGKRKRGIWWVLVHVEMQGYYVEIFSAEFENLLTELRDAVIPMLHTEYVQMLNGKREMVIKNLENKIRLVGIICTAFLVGCVIISLSSIWTARTMVSDAQKKVYVLDGNVPILVNRTTMDETLDVEAKSHVEMFHHYFFTLPPDDKYIRYTMEKAMYLVDETGLAQYNTLKEKGFYSNILGTSSVFSIYCDSVAFNKEKMEFTYYGRQRIERRSNILMRELVTAGQLKRVPRTENNPHGLLIVNWRTLLNKDIEQKTKINYMNIKGFRRMLFGEKMPDKNDPKYKDRYEREVSAGRKFAQATRIDKAAAKVQGFANAHRILFLVIVFGFAIGGFTWNIYRITMAYRNSRPTRTATEMQDSVLRERHKRLQGGEIRENRNENKKYEPQMNTRFEKSVRSSDEWYTPKEVLKALGRFDLDPCAPVHPLWPTAEVMYDRDMDGLSLKWEGRVWLNPPYSRPLIEQFVRKLAEHGNGIALLFNRCDSKMFQDVIFEKATGMKFLRHRIRFYRPDGTRGDSPGCGSILIAFGVENAEVLKNCSIEGKYVQLNMMKIFDKINFREPKYMLPAVLYIPLLVASYFIFDLFQTETAEIPDKTLQTTEFLNPDLPDARLKGGDGIGSKYENMAKSWGKIQDYSAVDNIERDEPDDNKEEYESQYTVDDIAQLDEQQQEKAAAAQIADAKTREQEALAELEKALAEARLRGRNEVLPATDTDSTASAQPPTATIEVKGKIEEESRSVKAPSENEPPSEVVRKVKTASDYFNTLAVNAREPKLIKAIIDEDIKAVDGSRVRLRLLDDVEINECVVKRGSYLYATMSGFSSGRVKGNITSILIEDELVKVSLSLYDTDGMEGLYVPNSQFRETSKDVASGAVSGNLNMNTGSYGNSLSQWGMQAATNAYQKTSNAIGKAIKKNKVKLKYGTFVYLVNGREKQMIEIDNIYNMDCIEGMKLMANGSVDAVIADLPYGVLNRSNKAVHWDRQIPLEALWEQYRRITKPGSPVILFAQGIFSARLMLSQPRMWRYNLVWRKDRVTGHLNANRMPLRQHEDIIVFYDRQPVYHPQMMPCPPERKNHGRRKTDGFTNRCYGEMKLAPVRVAEDKYPTSVISIPKEHKTGAFYHPTQKPVALIEYLMRTYTNEGDVVLDNCIGSGTTAIAAIRTGRHYIGFEIEPTYCEIAGRRIREELERGHGIKESEIREIKKMNKKIIITAFLLAAGLFATRNAQAQRTYEEMERLTVNEQVTTVITASEPVRFVDISTDKVAGDQPIENIIRLKPKETGHEDGEVLAIVTIVTERYRTQYALIYTTRISEAVADKEIQLQERDAYNNPTVSMSTADMVRFARRVWNSPAKIRNVATKAHRMVMRLNNIYSVGDYFFIDFSIENKTNIRFDIDEIRVKLSDKKLSKATNAQTIELTPALVLEHGKTFKHGYRNVIVVKKMTFPNDKLLTIEMTEQQISGRNISLNIDYEDVLSADSFNTALLEEEMTMKKTLKTVLLLMLVCIGFATNAHAQRNGGRLSLGVGLLYENGMDVTLAYEHEMNYRHAWEFFANGYLKWTECKSCGHICPESFWRNYRTYGFGVAYKPCVVRGRNHYGNLRIGASAGSDTNKFLAGIHVGYEHNYELRSGWTLYWQVKSDMMIKGADLLRTGIVLGVKLPIKMIRKIQWIAMVVAAVLCAACDAHIDVPDTAVRPGHILCEDGTALSYAQYEQSGKRAIAVVFDTERREGTEGNGYAVYLWDIAPAAFADSLGVAQGTSADIGALDGNMNTFALYDTRETASPMAEAVFDLWRYGQSAYIPSVAQMRLLYAVRETVNPVIERCGGHPLPLDEYDCWYWTSTEVSGQETAKAWLYSTGSGAMQETPKTQAHKLRPIITMNKMNIDMLFCIVLMVLGAFLIYYPIKDESPRQKLKKLADSVASDKKDIDYLIQRFSYLLDNMAADNGKGSALRCQIAKLEEVVKELNGKRKELELNNRSMTDVNDELKRSNAELLRKASELRDEIQQQEIKIQQQEEYINSVQRVKEGLEIALDNIQAEEVHYLSQPIFSMKMTPIVRSKLESHGILYVGDLIQLNEEYLMEIWGLGPVALERIKTKLNENGVWFGMDVIRINDRWYRRKQELTTDMEESKELQGFYKIFRAVIYISVLMEFFEYAIDPAMLDHWGGILIDIHGRIKQWMIYNDGNLVYSKIATFLLICITCIGTRNKKHLEFDARRQVLYPLISGLFLIVFSVWLYHHPMETRLYTLPLNIIFYMATTLVGVILVHIALDNISKFIKEGLGKDRFNFENESFEQSEEKVENQYSVNIPMRYYYKGKFRKGWVSISNCFRGTWVVGTPGSGKTFSIIEPFIRQHSAKGFAMVVYDYKFPTLATKLYYHYKKNQKLGKLPKGCKFNIINFVDVEYSKRVNPIQAKYINNLAAASETAETLLESLQKGKKEGGGGSDQFFQTSAVNFLAACIYFFVNYEREPYDANGKKLYAEKRQDPQTKFWKPTGVVRDREGGSIVEPAYWLGKYSDMPHILSFLNESYQTIFEVLETDNEVAPLLGPFQTAFKNKAMEQLEGMIGTLRVYTSRLATKESYWIFHKDGDDFDLKVSDPKSPSYLLIANDPEMESIIGALNALILNRLVTRVNTGQGKNIPVSIIVDELPTLYFHKIDRLIGTARSNKVSVTLGFQELPQLEADYGKVGMQKIITTVGNVVSGSARAKETLEWLSNDIFGKVVQVKKGVTIDRDKTSINLNENMDSLVPASKISDMATGWICGQTARDFVKTKTGTGGSMNIQESEEFKTTKFFCKTDFDMKEIKAEEAAYVPLPKFYTFKSREERERILYKNFIQVGQDVKDMITDVLNKRGAKMEQQVIPSDYTQYAEAVEIIKHAIERCRYRSAAAVNKETLSLYFGVGKFVSENSRIGCWGTKALPTISKLLQRELPGLHGFSESGLKRMRSFYEEWRTFLIRPTVLGELENHSSEKGTALIHPTALGELDIDEHLLLQLIGQPVNTEFTWDDFVKISFSHHIEILTRSKDIAERLFYIHCAAQNAWSLSSLKNYLKEDIYSNRGSLPSNFLQVLPEAIYAVKAILAFKDEYMLEMVNLENVGEREQDWNEKVIENQIVTNIKQFILRFGNDFTFIDSQHRLIVAGEEMFADLVFFNRELNASVIVELKRGKFRPNYLGQLSGYLTVYDMTDKKPHENPSIGIVLCQDANRKFVEIMVRDYDKPMGVATYRTAQEMPENLRKTLPDIDKLQNLLSENDSKSETVRMFMRLGRAEKAGSGVDKIVSGWQSLGWPLPTVAEETRPDYVVLTLQLGMKTRQENPQENLASRIMEVYINPMIGTGVLEMTEPDNPTSRNNGKSGTRTSKVSLMDKEYVMHIAQTIKEQLVSLTPMPILMSWGIGDFVATVFRDLPALRIKVNGRLHAGNVVIALNGSDYYEVYLLKENGAECVNEEVCFDELGDVIDRAVESGTDKEEYDKFCDRQLAVLLSGTRAMKTKELQFDGNIYICRIVKSNEGEELLIGSTALLDALHPGSFEDENEGFASKEAEQIYDEVFFFTDAKTLKLPDDELITELKEDNPEWFNMDNIKESKEYQLAKDWERAVNDYGFNPKRFAAAIPEMHPTLQQSLYRLVKECIVVMADETRNYDDRNRASHEEAKCIMEYLKAHGKHIPLRMATTAVQAVEKNITSVALADIQSSSYNPRKNFDETSLAELAESIRQQGVLQPIGVRPIADNRFEIVFGERRYRASLMAELAEIPATVMEISDETAEEMAITENLHRKDVTPIEEANAYQKLIDSGRHDVQSLTVQFGKTEAYIRTRLKFVSLIPEIAVLLEQDEITISVASEICRYGEEIQREVYDQHLKEGVQYNSWRGMKASEVAQSIERQYTADLNRYSFDKTLCLSCPHNTNNMMLFCEGSCGNCANRACLVEMNTSHLTEKAMRLMEQHPAVPLCHESYNYNEAVVDRLTAIGYEVESLKTYATKYPECPQAPQKEDYDTTEEYEEAVKDYEQKLNGYTEKCEAIRTRSEAGEISLYLRIESNDITLCYVANTATTANGTATKMPLSPIEKLEKQDKRNKEIALEKTVEDTKKRILEVDMSERKFGQDEEKMVYFFLLSSLRKEHFNEVGIEDKGSYYYLTSEDKMRIIENLTAKQKAVIRRDYLIANFKDAFGNNATASLLLDFAQKHMPEELANIQDGYNEVYEKRHQRIEEKKAALQEQATQEAEQPDEPQPEAEAQTEPQAEEIAAMVDICFVIFPSFRFFFLPEPLGIYRCFKGLTNKLFSTLFPENYSFTERKNFTRNALQSDEIKRGSPNLRLENQPAMAGTRPDKRQEEWIERGNAALQLMSKSDSLKNGMRSGLDGLLSSTGKSTQKKEPAPVKAEKEPAVHCNFVIDKSIHTRMKYLAIEKNMSLRNIVNEAMKEYLEKHEKMAKIIAVLNHKGGVGKTTTTINLAAALQQKKKRVLLIDMDGQANLTESCGLSIEEERTVYGAMKGEYPLTVFELNNGLSVVPSCLDLSAAESELINEPGRELILKGLIAKLLETRKFDYILIDCPPSLGLLTLNALTSADFLIIPVQAQFLAMRGMAKITNVVEIVKTRLNPNLNIGGIVITQFDKRKTLNKSVAELINESFCDKVFKTVIRDNVALAEAPIKGLNIFEYNKNSNGAKDYMELAKEVLKLKMSYNKLKSLVANVEAIKTALQIHIQGRQATPEEKETLSQYSGFGGIKEVLNIGTDKPVSGDMEEPIRRLQELIDTYPYFTEAMKASVLTAFYTPKFLIDVVAKQIHATFKDNELQMRSFLEPSAGIGGFLPVAMSDTCGYAIEKDPVSGLILSLLNDNTVTRTAGFETIDEQGFEHTKFDVIASNIPFGNFRVFDAELWKKGGIYEQATKTIHNYFFVKALELLNEGGLLAFVTSRGVADTPSNKFVREYLVNHADLISAIRMPDTLFMYTSGIEVGSDLLIFQKHTHKAALSQREQLFLQVGREKADTTGAMTEYANKLFTLPKTTLATGSRIAMNQYGKYVRKYQWQGDENAMSQYLAALLKLDFGRYFRKSLFTSEGQDGIHTQMSLFGSVAVKQPPKGRRAYTDEPEAWMKEGAMVLFEGQVGIIRYRKSELYQETATDFVPVDEGKVNTERANDYFSIRKAYFELAIKEQEEQTEQPHLRERLNACYDAFVAKWGFFHSNDNKEFIMLDSLGVEVFTIEMQVKGDIFKSDIMREPVAFKKIDTTVQLTPGEALASCLNFYGCVDMDYLMQTTGKDEDEVIDDLKGEIFYNPATGEWEHKGKFIAGNVIAKSKETGSYLPDLTGKEKDWTETAVKALEEAIPEAIPYEELDINMGERWIDTKLYADFATELFGTETDVMYFDVNDTYLVRLQGYSPVVYNTYSVKNYNGEDLFVHALQDTVPEITKEIERNGEAVRVPDEEAIQEAATKIQEIRNRFNQWLDCQPIEVRDELVRVYNERFNCYVRPHYDGSAQTFPQLSFENFPYDSLYPSQKDAIWMIKQNGGGICWHEVGTGKTMIMCVSAYEMKRLGLVQKPLIIGLKANVHEIADTFRKAYPSAKVLYPGKEDFTPANRKEVFSKIKNNNWDCIILTHDQFAKIPQSEQTMIDIFTEELADVERNLEVLEQSTMRYRSGKMQDGLEKRKQNLAAKLKELKMKINERKDDAVDFHSMGIDHIFVDECHIFKNLIFQTRHTRVAGIGNTKGSQRAMNLLFAIRDIQHRTGRDLGATFLSGTVVVNALTELYVMFKYLRPRELQRQQISCFDAWAAIFTQKTADYELNVTGAIKRKERFRTYIKVPELAMFLREITDYRTADMINLDVPDKNVRFLSHAPTIQQEEMIGRLVSFAHSGQWEDLGLDTPEPDNLDKAKMLVATNVARKMALDMRLLGDKFSDDAENKASICARTIYEYYMRSNENRGTQFVFSDLGTYKPNEWNVYTDIKEKLVNLGIPTDEVQFIQCATTERARKRLFEDMNNGKVRVLFGSTTMLGTGVNAQQRAVAVHHLEIPWRPADMEQRNGRAVRKGNTVKLWGGNVVDVVIYGTEKTLDAYKFNLLKNKQMFINQINNGTIAVRRIDEGGMDEDNGMNFAEFVAILSGNTDLLNKAKLDNKIMQLEKEQTIFKKERIRAERKITAGQEDMAKTQRTKAGFIKDWEYFNSYEGTKVTQLLNLPQATAEETGRELHRIAKTYRSGAYGTIGTFTGLNLLVRSEYSINGTFDRNTFFVEGTSGLKYRCGLTGALPLGFVESAQYPQATLNKLPSLIEKQQKTVERIESEIPILQDIVGRQWSKADELVKLKLECKELQRKIDESLKDAERSLTPSETTAAEYEPTTKAAMETTTIHPAEAYLRNEQNPTSLYVRIAGKRRRLFINRNENVIGIIALGKRKSGYIFTDWASIEKIYYPSSSPEDAADIEKKLVLKYQKLARLATHTNDWLRKIANADLDKSLYENRITTGTRIDGKCIGLATIEKYCGSWDMARFRTALKQGEKFSTGRFDFCGYDGTLWCEPRENGDMAAGFSKEYRNCGNGYYYLLINDEYMIGYDIDMVEEIRQDGRVILSSEDGFSVPMIFNNLCGKNFIGKEYKDYIRHIAFEEMGLKPGIVSHYRNGVLYKNGTIPELMSNKTTTSILEYAEVHRDFSMDDLFAYLHEKVGISKSSLSWYLFKLVNENALVRTGRGMYAKVMKQSFVPKLIGEVREIYDSLLVNFPFAKFCVYQGDIIATLQHHLSSNRVVYVETDRDSAETVFNFLKDGNRDVYLRPDKDMIYRYVDMDSRVFFVKNLVSEAPLQKVSDVPMPTLEKLLVDILRDADFFYLQGSESEHIFENAFNLYAVNRNRLFRYAGRRKAKEEILSILENLNIKMIKKECFTAEWIEQVSSELHYNDKNLIEKVIRALSLLEMLVKAGCPLVFKGGTALMLILGKSAHRLSIDIDLICPPGTNIEDYLKSFADFGFINLELVERKQRDDADIPKSHSKFFYQIAYRNDTDAQSYILLDVLYEDIHYFRTQQIAINCPFIRLEGKPLMVTVPSAEDILGDKLTAFAPNTTGIPYYRNGRSCSMEIAKQLYDVGRLFENVSDLQITKEAFRKIAVVELSYRSFGTDIGQVFNDIRQTALCISTRGKAGEGDFDLIQDGIIRVKSFMYKQRYLIDHAIIDAARAAYLATLIEKGINEIESYSNNPADIKDMVIRPSLPNKLNKLRSNLPEAYYYWAKTSELLEAMKFYEHRMEKIKAVFNWSGGKDSAHALWRARQSELYDIVALLTTINRDSQRSSMHGIPLPLLQAQADSIGIPLHIVNLTPQGNLENYAEAMTCAALHFKEQGVTHFIFGDIYLHDVRAYRERQLAPLGIEVVEPLWGVVSSEIVMQQYLASGLKTVIVTTQADGLGMDAIGREVDADFIASLPKEMDHNGENGEYHTFCYDGPIFSSPVLFRLGTPFSQSYDIRLEDGTIQTYTYCFAHLSAEPMENKGYIHVYTGNGKGKTTAAFGLAIRVLCAGGSVFIGQFVKNMKYNETKIEHLFNNVRIQQFGRGCFIEKKPAQEDIDAAYAGLESCKQILASGEYNLVVLDELTIALYYELLSIEEVLTAISRRHSGTELVITGRYAPAELIDIADLVTEMREVKHYYTEGVLSRNGIDRMPAQAQFNTIAKTPERYKVEALQEGMKKPEPTPESMAPVQETSTKPADESKKLWIDRYLSVSYPLQRIRITSPYGYRKDPFTGKRKFHGGIDLHARGEQVLAMMEGVVVKVGQDKTSGKYVTLRHGNYTVSYCHLSRVLTAKGTVVRPRDAVGITGSTGRSTGEHLHITCKLNGKSVDPSVVFDYIRTTQQECISALSRLLMLSVKFFSFGKVITGVFMSETNSRHFLYWFDILRLLVRFELNNRTNEDKNSILMKKVQIEFDELPFPTLERFGLTREMIEDLPMRVLDDICDGRHSPVLPVRVTDEHGGQIESRSRFAFIRMDNGQVDVVFYPALKSSPLERYDEAQQKQLLDGKAIVADVEMADGRSSKAFVQIDTETKQVMYVPTPIIARNLKVLAEVMRLGAVEVNGMQHGEPLTVVVDGESATVGIDLHAKTGIRFCSGDAQQWRNQPKREWDKYTFGCYGCWIMDDDGNLDYVSEEDYTEELWNEQKKSGERNRAAALHKMAQNEYYPEEVLVGKMQSGEYGWLDYVNHFSADWQEEYARYCEEKGLAVGNESAAEFVRFKDEQLEAAMERGDAMAIRTNTNPRQMDLQPEMRNMLMRNGLQAHVALDGSGYRLIVQGHNSPLLVYPISERQMLALTDWGTNTANKKAYNVLTSIVGKDFYMPKNFVHARNANGRVAMGLHGYRIGIGEYGRMGRMGMPPPFLGWTPRNQWGLHLRRVGGQLFFPGPSIVPERPDGRMKPGELQSGGYGFYYKGHQQAQPVQQRDVLQDLQAVITPMVSRPRSGEPARSYKELIASPVYFSNEKLAECLASHGLVVDAERRTLTVQSESVQADMVYDLTEKEVRTLVAAPIEEQPVEKRLELLNGIIGADFSDKVTMEALNSDQRIAIGLHPEVQQDLEQRQRQEQEAFMPVETSLQQQEESIQGYVGAAVDGRDLQFLNENKGWYREEKHGREVEVSQIAVQPAQTEGKYRMTAVIDGQAISHEITQRDYDKFLAVDDYHRMKLFSKIFSEVDMKTRPEAQRGLGTKIFAALTAGTVVAAGVAHGIHHHCHAPEFYGECFGGPPRPYIKLGVDTPRDMAIRCFEAEMNREINDMRMGRMREGELTYDDFLRRLNIQDVLIDAGYHLNRRDGLRYPSYVRLDSEGRRIRNDKFIVTQQGKCCFKPQQQKSYNIISFIKEHPHFFAEYRTGVSPDRLVNLVCNRLLNHPVADRDIRIIQPKRDVKPFDMADYDIHQFNPQDRATQKKFYPFFKHRGIDLYTQYAFHRNFCLATKHREDGMKYTNLAFPLTVPKDTGQVVGLEERGRPRMDGSGSYKGKAEGSNSSQGLWIASPAKTTLTEAKHIYWFESAYDAMAYYQLHQANDKDLRKAVFISTGGNPTVEQMRGVLTLSLPAKQHICFDTDLAGIEFAKNLQQEMYRVVRSTIEETPERKPYLDSVTDGKNLDEGDIDLLPDALRSSYGKYESAWEEAMSMRSSGLCHPDDIREQTDIMNGNYKEFREGLREFLGLDKANDASFVREQPTYPNKDWNEQLLAEQKQEETVDETQAREQSPEEEQQTHFRRMMTDAPTGHFQSIVLQPHAGQFVIDELPAIVLCCAAWVYGGMEGLPLTALAVSVAALLALVLLYRFIYLRRTRYHIGSEQLISRHGVLSRKTDYMEQYRIVDFVEHQNLMQQLCGLKTVRIFSMDRNTPRLDLVGIRHNFDVVTLIRERVEYNKRKKGIYEITNHMKSRIISLVIFAVCMMPHWAKAQITASNPLEWMALAEGNEVINDQIEKQINGQTKTAMLQNSIAAEFNRIHKWEKQYNSYLKTASGYASSLKACTHLYNDGVRIFLTLGKLGNAIRNNPQGIIASISMNNLYIETATELVSVFTLLNDAVAKGGKENMLTGAERSKTLWALNDKLSAFSRKLHLLYLSIRYYTLNDMWNNVTAGMLDRNNGEAARMAMTRWRRAAVLARMKRTIWIGILLLCIGIGKARAQNDPVLAGMILLYTDKAEKELKKQEKVMLMQTTGHLWTKEEVKATTDLQREFNSYLDSFRSIVCYAAQIYGFYHEISKLTDNMGDFTRQVSRNSSHALAVALSTQRNRIYRELIMNSVEIVNDIRMACLSDNKMTEKERMEIVFGIRPKLKMMNKKLQRLTKAVKYTTMGDIWREIDEGARPVAGKRDIVEAAKRRWRQIGRNVRPMGVWSTLLKYGGKAAKGVGTATAATGKSMGKAVLHPSQTLRGAGQAVKTATIGGAVGYVGWEKLTTDKSVVRIVSDAVVGESVTDTIAGTADGVRELTGKAGEAVSSVSGAVTGIDNKLNGVSNFLRQASGGGGLDMFGNFFRNLGSGNVSGLSIAGLVAAAFLIFGRFGWLGKIAGAFLGMMLIGNNAGVFRTPETENVQRTRTPDFSAGEQAHGGGMRRMKYTEEMILQSDSGYCMPFEEQQGKDVELSLGYGEQTDPVTGEKFFHHGIDFNVRCYMLSALASGIVSGVGNDSGHGICQTIRYGEYEVTYGNLSNVFAQFGQRVKAGQTVALSGDKLHMTVRFKGEELNPLEFLTMLYGNIQAMRQAGGHETDYPSGVEMELGTDYDRDKREIEELMLRFLPHYMEDLRHGAYTLPRNTEQSLRHIFTVGAMKEYFYENMPSMANPLGLGHKAMPLACKVQNLLIADFLHYLALRHDVYLSTAGSDIKKNSMTKPMAELDIDIQSFDIPRLVTVYPDRAGVRWWTKAWFNNREEGETSVEIEREQAIRFMQDNIEKDAWLEEFFPRQMEVYHNAIEQTKEQLLKQINIMDGIKHSRQFAEMERLVSDYFHCHLAPVMSKTQAYLTKKQGEEMREYSTSLGGILSAMASAAQPMGDPYQVLKVTGEWNSKTTEDYIGMCKAEITGSKEIQQDLAYMAGQWRDTVVQEIGRKRYDELSEQLGGDLAYAYMDYRVEELMIDRLVKERMPKSSADYIIRKAAESSLLGLSQTFNRSPLAVEIEARGEAAYRPKGWEKGAGRVLGATADTVMMGGVGSWATLAKFVGADVAISAVASRFEPEKSPKLSVEQCISKGVFGSERNVFTDFRKEAATVQTGDSALIVAANERLKKKIPVMDFSFPKWMQTPKFTPFQMPEIPGHPEKKNERAERYKDVPLVVAPGQEEAYLKHLEKYKNATAVTAKKESTQPETEQREKVEKEERQVVIPREEEKQEREAVQTNTNGWSGLLSTLGLEGLGDITGNLGYVMAMLPDILLGAFTGKTQSLRFGDNLLPIASIVAGLFVRNPLLKMLLVGLGGANLLNKAGHEALGRPMPSAAEQTENQYRRYPDEPLNPRIVNPVLQGSTLIATIDRVPCTIQLTPTVAEAYRAGALPLNTLANAVLAKSDQLRHIASQNYDDGQRETVVRTRGIQMKEKSQIEKKAEARQAELLSAALSGASNAGGHWLNVSGKGFPRLYPQGVSASPFNALFMALHSDNNGCKTNLFTLYSETKVRGAAVREHEQGVPFLFYNWNKYVNRNNPDETIDRTAYLQLDEEHKAQFKGVHNREIRTLFNIDQTTLPYVDKPAYEDAVKQDGSVQERGYTEADNRRLRTRFNDFLLKMRDNLVPVRSDGSGVPHYETDKDAVYMPRQKDFEHYHDYMQEALRQIVSATGHQQRLAREGMVMKNGVAPSEDAVKYERLVVELASGIKMLELGLPARLSDASLKTVDYWCREFKENPCMMDALESDVNNALDVIRKAERGEKIEYATLRNRRQTTTMQEQMHKHYFVANEIRQHPDKAAKSIVLVIDREAKSADVILPAGASTEANNEIPGMNKGRIERALQKEGIEQVRFYNTDGALGYRPDDSYFNEKMVTLARLRNYTLEKLSTLDVSEAVRRANEVGFDAVQMIQDDKNRWALYIKPENKEGYSVYPDKEDVNRFFSTLKQAMDNIDKVRMELAHKYYALAEVKPDLKVDLFGSDTPEIDLNRIQRVAIFKTRQDGIQCVATIDGQKLQPRSVTPQQWQRMWVAEDRDGYKRHLAATLFADVLQKGQSVGEQKAEEQVRQQNETVPENRSEETNDENMSPKRQFWDNLKEKHPDALYLIRAGEVYRLYNEDAAKGAKILGITVKEYPEHGFSTFAEFPRTQLDSYLPKLVRAGERVAISEIELQDKRQDEQETHRGIHRMSKNQEYALQYADYAMAQMRRYGIPASVTLAQGILESSNGQSRLARNENNHFGIKATPSWIAGGGKYGIYTDDKPNEKFCSYDSVGDSYEHHSRFLKENSRYAGCFKLSPDDYKGWAQSIEKAGYATGGKYAENLQKIIEQNGLQKYDRQVMQEMAAQGRQFGVEHNPLQTSEGAEHGTGYSFPVEREEFLFITSPFGTRQDPLDGTKQQMHKGVDIRCKGDAVLATENGGKVVAVNQNKNTPGGKSLTVEYARTDGSKVQCTYMHLKEISVKVGDTVQAGGRLGTSGNTGTRTTGEHLHFGVKNIYADGTKRDIDPAAYLAEIAQKGHIKLQMLHNGNDLLAKYKAAEDTVPEKNLSPDGWMKKLLSSEDSGVGMSGCNDPIVEMAMTAFASLMLLATQIDNRNEEEQKAMISTAMDLRTIDLKPLLPNMKNCDLTIGENGKAILKADNGELRVSRELTASELNRLSATLNNGTLTEETKRMRVTGMLNTVILSEAASQNFEQEMSRQQGQTENLRRMVKCVMIQLCKCLAGVSILALHVRFCYLLLGWIGTLVVVGVQLAIAGWMVWAMIRAPDMIKCNVTVCGVIGRDASVRKNREEKEFMAFPLRVQIPATGGRHTIEVDVRKECSQEEATGYRNGSRVEVRGTMYLKRRGDKLYFNLFADEICNAATDDADCVKGELAFRGKVGQNIEEKRDKKDQPYTVFSAFSAEKVDDGFEYQWVRFFCFGKERDAWLQPGIKVDAIGEMNLSAHNGKINLSCKVEELTQYVADSSNYNQMAGYRKKNADGPNSEDKALDLFAEMMIEKIEGIQKDWKKPWFTEGALQWPRNLHGREYNGMNAFMLLLHCEKEGYKIPRFCTFDCVQKLNKSGKDGEELPRVSVLRGEKSFPVMLTTFTCIHKETKEKIKYDDYKKLSDDEKEQYNVYPKMQVFRVFNVAQTNLQEARPELWQKLEQENSRPAIEEGEHYSFAPVDTMIRDNLWICPITPKYQNDAYYSITKNEIIVPEKEQFRSGESFYGTLFHEMTHSTGAEGVLDRFKPTTFGSPEYAREELVAELGSALVAQRYGMTKHIKEESCAYLKGWLDELKESPQFIKTTLLDVKRATSIITQKVDKIAQELEQNVGEKQENGAAAKEKTFYSSVAYLQFSDDTRPLDELREKGDCEGLLTLAKEYYDGNGINEQHTYLSATNNKGDSLIAEDENFAVVYNGSVGGTYEVMLKFTEQEIRDHIRRYGVDIAGDTIKGVAREMAAEQFSALAYQKIPAFEMPNGEVLYVEYNKESDTLDVGQPTNAGLVAQHRFPYDHNVGLDANLQAVNEKLNELEEYRAELQEAEYGSGMRRMAQNFYTKWQDAILADAGDYVSKEYRSFQTALVREISKYAAAVGAKVASNSKGHYDTSCFIERNGKFVYISHSSGLSRMGSGVRIELDSFLIRTAQNGKDYRGGCNQYCDIANLQSMIDGLLGKMTTNDILKRLCGNIAAGRFNWRKYCTPQSYFGWEICVTPLHCSYGQIGYTVHFPYTNIPEVEYDWEMGKLTIDGEKWKSYLRNEMSKYDFIKQGNLLFWHTADNDIECRIISTPEKVDSDSIILISTSSSETEVLASELLPIGSSRSHKEEFMRWKKEREAEGMEFFSRLSEVMETDSDLAVGDMVAFTNDYGVVFGPKEVLAFRKPWNGYRCVYIDSDAYWFPDRPEQLTILSKGGTEMSKEPAMKFYEIPSSPITESCRQILFQVAIAVLGQCSSTVPLHTKTDLRRMSGLMHSRIFQISTEPIDKENYLNEDTLQQGDGSFYDYCSEIDEEDRKEDIANLVNHALPKGMFELISDDTMRYNGGIEQWKEEYVANIKKRANALTADNMLEWGSTYYLKQAVENPLDVAYHFYLDGDGCSLLPNSPLRLWSLFVGLNRERYSTSEELLITTSDVCPKHWQPPASKVGGCSLFCTGSPVTFINMLCRASATGFTAGIFLFMGGWVFRFIPYTVYLPYPSFSRCQSCIKIIPRREAKRVSRKGKKENIMWKAAVKNIREPLVKAILDDQTHAVPLHIKSLRRELPTMKKNFRFLAMAVVAMAAAVFTGCSSDDDFLAPYEESAIQTRAISSTNALIDFDNVPSSVMASDQYGNNLYSATANGKQVTTGYITQIGQTGTYIQFPINYLEQEWVSGQPWEYEFWNGGFAISNFHNLTQGDYQNQCSVYWPNGGHSGKNFAVAFGYSDSYNDSQATYDKCAKIYLTDATGYRVVTTNTPVKGTPKYGKFNSVWVCNTTYTYLVMKDGNSFTQGSLSAQKGWFKVVFVALDATGKPTGKEVEYYLANFDSSKDAESGLTNKIRTGWNQVDLSGLGDSVCTVAINFEGSDSSAYGLNTPAYVAIDDIDVTVNEMKKYLLLFSLTIFLFACNKDEEISQDVILPPVIELDSEDGIYVVKIGKEVVIEPTYQNVDYAVYSWKCNGRIISDEPQLKYIFNECGSYYVTLRVDTRDASTEEEIRVDVNELAPPVISLVTPSIGLKVVAGREYILTPDIQNAEGATYLWTLNGNEVGTENTYTFKQDELGTYELTLTVTNEDGQSKKTVSIEVVDKLPIEIVVPSSLYFTENNTKYVELGRTLFVRPFVSISAEPSYQWSLDGQPIEGANSLVYGFKPAKTGEHTLTFTVKYDNQDTKAVLTRNISVSGVDEVSVNIPVKCCEAAGKRPFAAGNSIYSNKVYEFVPAPGQFVNETNTAGFNGESTHEAACAYAQKRLDNEQYVSLGGWGGYIVVGFDHSIENKGGYDFSIKGNAFDSSNEPGIVWVMQDVNGDGLPNDEWYELKGSEYGKPETIQDYAVTYFRPGPNMDTQWQDNKGNKGAIDRLGNYHPQEFYYPLWIEEDSYTLYGTCLKARTEQSPSTGMWSNNPFGWGYADNIGDDMPNKDNPNAGALGNYFKISDALNIDGTSANLSHIDFIKVQTGVNVKAGWLGENSTEVFKFCDENNNNDKMNKIYHFILFCFATLCLAACSDDDPEVSGIDGKDHFISEFALTVDGITYQAMIVGDKITVEIPYNTSLKGATVEYALCEGASINPNPSTIEDWENEWKFVVTSKMQDSKVYSYTYQYTDIEQSGSVVLATQAEVDNFAKTGINKIEGSLTIGTADGEEITNLDGLANLKQISNSLVINPSYKGTDLTGLDNLEQLGSFKLGSTTSASKNIMLKTVNLPSLLGVTGDFVVNSSVIEKISIPKVEFIGEDMYITSDALLDLDANAVESVGASLIVKGSVAQKESATTEAIVFSALKQVGNELTIQYFPKLQGIYLPALESVAGTASFSDMSSIGSLAMTELHSVGGLTIKNCKEISIVELPGLISCGETSVDANKVNKLNIASLKDVLGDMTLTNLLIEELDLSQINFNGNTLTLQCKQLNKIVGSETFNGSLFLLPKDCRLTEFTLEGISNIQGDFQCIDYFYVKEFVMPFIRVAGDMTIALNSGSANTAAEIEFPKLQEIGGTLTLGTNRNANNITFPLLKKILGSCSVTTYKLKNDIEFTNLESIGTDGADAQIKFEIEATNILCPKLKTINGKFDIATSSFMFDMEVDKVSYPNVESISENLSITCPYSDFGSNGILSIDFSGLKSAKGISISGQGDVTDFSSFKYLFENNVLTGESQWSVKECGYNPTFQEMKDGKYKLAEMTYHQLKYLLWSVVVGVTLSLTSCMKWDYGDAVEDFNATGAGLFITNEGNFQYGNATLSYYDPATKQVQNEIFFRANGMKLGDVAQSMTIYDNKGWVVVNNSHVIFAIDLNTFKEVGRIENLTSPRYIHFLSDEKAYVTQLWDNRIFIINPKKYEITGYIQVPDMTMESGSTEQMVQYGKYVYCNCWSYQNRIIKIDTETDQVVDELKVGIQPTSLVMDKYNKMWTVTDGGYEGSPYGYEAPSLYRIDAETFTVEKQFKFKLGDWPSEVQLNGDRDKLYWINKAIWSMDVTASHVPVRPFLEYSGTIYYGLTVNPANGEVYIADAIDYQQQGMIYRYSPEGKLIDEFYVGIIPGAFCWKMKNKLRHIYHIIFITKRQEMTIPMTTKGMILDQMVQIFTRKGCHVYACNAFLNHVHILVEIPSPTDFAKIINKVKSSTGVVYRKYPEYADFSGWAAGFDSFSVSFNDLNRVKHHIEKQETVHQELSFEDEYDQLLEENGFNAYQDFMRASFSAYAAVNNHIKNKRKMTYTKYLLFSILVVCPSVLSAQGITRRIHQIDEVTVWGKRPMKEIGVQKTKFDSLALKENIALSMADILTFNSSVFVKSYGRATLSTVAFRGTSPSHTQVTWNGMRINNPMLGMTDFSTIPSYFIDRASLLHGTSSVNETGGGLGGLVKLGTAPEVAEGFNAQYVQGIGSFKTFDEFARFTYGSERWHVSTRAVYSSSPNDYKYTNHDKKINIYDEDKNIVGQYHPKERNRSGAFKDLHLLQEVYYNTGKGDRFGLNAWYINSNRELPMLTTDYGDATDFENRQREQTFRSVLSWDHMKSNWKLGVKGGYIHTWMAYDYKREVAPDNWASMTRSRSKVNTFYGQAEGEYSLDKKWFFTANVSAHQHLVRSEDKNIILQDGGKAIVGYDKGRVELSGSVSAKWQPIDRLGMSVVLREEMYGSDWIPLIPAFFIDGIISPKGNVMLKASISRNYRFPTLNDLYFLPGGNPNLKNEQGFSYDAGVSFDVGKKGIYKLSGGANWFDSYIDDWIIWLPTTKGFFSPRNVKKVHAYGVEVKANFAVQPAKDWLIDLNGSYSWTPSINEGEKMSPADQSVGKQLPYVPKHSASLTGRLSWRTWAFLYKWAFYSERYTMSSNDYTLTGHLPEYFMSNVSLEKNLFFKPVDIQLKFAVNNLFNEDYLSVLSRPMPGINFEFFIGITPKFGKNKKKSENTNMMKALKNLSLLLLLVLAFTGCHNKSSKLADFNRTVYTPEYASGFDIKGADGKKSVLVTVTNPWQGADSITTNLFIARDDEEVPADFTGQMLKGDAERIVCMSSTHIAMLDAIGETGRVVGVSGIDYISNPDIQARRDSVGDVGYEGNINYELLLSLDPDLVLLYGVNGASSMEGKLKELDIPFMYVGDYLEESPLGKAEWLVALSEVIGKRAEGEKVFAEIPVRYNVLKKKVADNILDAPSVMLNTPYGDSWFMPSTESYVARLIKDAGGDYIYKKNTGNASAPIDLEEAYLLASQADMWLHVGMANTLDELKAACPKFIDTRCFRGGQVYNNNARTNAAGGNDYYESAVVNPDLVLRDLVKIFHPELVEEDFVYYKQLKMRSRSAILFAMLAALTLFLFLLDLAVGAVAVPLGDVWAALTGGDCPRATAKIILNIRLIKAVVALLAGAALSVSGLQMQTLFRNPLAGPYVLGISSGASLGVALVVLAGFGSSIGIAGAAWLGAALVLVVIAAVGHRIKDIMVILILGMMFSSGVGAIVQILQYLSKEESLKAFVIWTMGSLGDVTFDQLAVLVPSIIAGLLLAVVTIKPLNLLLFGEEYAVTMGLNIRRSRGLLFLSTTLLAGTVTAFCGPIGFIGLAMPHVTRMLFRNSDHRVLVPGTVLSGAAVLLLCDLVSKMFTLPINAITALLGIPIVVWVVLRNKSVTAMIKLHDFSIGYGERTLLCEVETTIEKGRLTALIGRNGTGKSTLLRAIAGLNRRYTGRILLDGHNAADMRAAEMARTLAFVTTERTRIANLKCKDVVAIGRAPYTNWIGKMQEVDKEIVMRSLASVGMEAYAERTMDKMSDGECQRIMIARALAQDTPIILLDEPTSFLDMPNRYELCTLLARLAHEENKCILFSTHELDIALSLADAIALIDPPQLSYMPTEEMRRSGCIERLFRNNCVTFDATTGFIKVGQMTKEYIIENFTANISVDEYISRFRDEKRFVEFCKQCPNYGNSWGCPPFDFDTGEFLRQYEYAHLMATKIIPVEKNIPIDRTQELIKPERLRIERELLEMEHRYGGRAFAYVGKCLYCPDSECARKCNRPCLHPDKVRPSLEAFGFDMTRTLSELFGIELLWGKDGILPEYLVIVSGLFHNSAENIISHTKRNQDSGNLMTKQIFFILAVLCTLQAQASVQPVQVDTVQHTPYYNVSEERQPIQPVYLDGVVLPASRTGNWFVSIAGGTSAFLGTPLGCEDLFGRLKPSYSFAVGKWFTPSVGARINYSGVQFKDGTLSNQDYHHIHADLLWNVLGCRYARQEQVRWNLAPFAGVGLLHNASNGNNPFTVSYGVQGEYRISKRVSAMLELSGTTTFQDFDGYGRPNRLGDHMVSLTAGFTFHLGKVGWKRAVDATSYIRQNEWLVDHANILSGENKRYKDWYDRNRRTLAELKKILEIEGLLDKYGHLVNDDETDRRQGYPRNNYSGLNSLRARLKNRHWDGISPLDSASIGYGNNGDDAEKPGIIVSERTELIQAGNCIGSPVYFFFNLNTAHLTDASQMLNLDELARVAKKYGLSLRVTGAADSSTGTPVLNGSLSTSRADYIVAELKKRGIPIERIVKVSRGGIADHVPVEVNRHTKVELFFMADQKQVLDVKVSKGITTAQSNEHLRDRSERAEKYAMNKGNYDPTRKHLNFEIAPGGKVRPIDTSRNIPERMADILERRGIKDPNEGLAEPKYRTVVNFIFGGSRKRMHELAFGTQKVDFEKDADNIHIKRESDIERWAKDVYSFVSGKYGEQNIAAFIVHLDELNPHVHCTLLPIKDGRFAYKEIFAGKDKFEYSARMKQLHTDFFTEVNTRWGMSRGTSISETGARHRTTEEYRRMLSEECTTIEENISRHQKVLADLQSDIRLAERRVKGLTTMVDNLEKSKAEKEALLSAAEQDLKANKGDAEQLAAQVKSLEKELAGINRQLADKQEKLQTADRQLAELKENMDAIEERTGELKEEAYKYSHDVHSKVDTLLKDVLLENVVGEYRNVSAQMDVAERQLFDGSLVQSIAEQGTDVMHCATMLFLGMVDDATTFAETRGGGGGGSDLKWGRDEDEDNRAWALRCMRMASRMMRPAIGKKPKRMKNNQKIPVSILADREVFEYLKEKGDERKTRTEAYCDLLDKSLAGFVSPFLRKKDYVLQPNQCYLTVSDLASEWHWHRATVRSFLSAMEAFGLLTRIQLPKSVVITMTVQSGQAAQPRDAQEQPDFAGQLREVLSDWVIGKTTAAETGVMCGQLVSLAKAEIADRDAGHCSDTHSITTSAHSGTLVTEHRETALCCIAHAALQKILHKSRFDDSSPLVDFFRLDLGEEWAAFIESAKDLAGLILDTEASVTDFDMDEDQERLKSLRKPFLSLLAKAQAMVDMLLNILLLIFCAIPFGVSMSLYKNNKRFMTPFYMAMARSGNARKLYVQVWLICLLLFHYVYACGHMGEFGILLSTGVCAAMFSFRWTDNWLRRLLDRPGAFVTLASVALVIGFVPHLYTLAITITYLLLAALFYPSVRVMSECKDTGTLSGWAKHPGMLSESYHDNHHANLPHEADSGNTDISAQYESLKPNENEKMVYCINTYRTWIEVADDNLYKEHIISRTDRTDYLVSRTLVLRAFKTNGIHAEGTTWTIPEHELDKALAIYRKQDSTFKQRIKKAAMYFSPKDAETLIRLATYGIVQLELIVRPTPIPEKPYYLCYMNMLRHFYNDFMAFVPLQLPQLLDVTTMEEPQFYGDYVLLTFPLRTPYELDEVMDMFEDDMELITLYHHIPMRTEKFGHSTCAYSNPAFGQMFKMNAKTDTEGNVNSILVTIYDSLEQMYGDLCLDLELHSKSGFLKYKKDKSDVLMNFIMKTSKSNLKQPIIFAKIIAVSIAVFLCASCDNGNGKRLAKAKNDPAGTYREYLSDIRRQKRLSIKELTGHLKQWQTLRDSVFLYLECDTLGRLHSTVREECEQIHDSIRMEFSRMVLSQTRTYKDILWVKEQISPHLEDKELHRVAETIRPFFASLDNQPVSQRNRQHILATYRATLAETIDYGIHCMADLTTFIEKEDAVYRAFLSRLPDFDGENLSDITHDTERCCAQVFLAAERNDITYRNAMIYLAMRTNRRLIQNVRTCIDDICNQKVKTPAQAQAYIWMLLQPYSSLDGFCLALLSAEEREQLDMLASQTPDAFRELGRMLHPGDNRLDELPGMLMEAFIHTLMITSANIQVLFEYLNHTILKNENRTFFMFLSSLVFIGNHTIKYDIKKCAKYGFSDAKYQKMAKVGYIFEANSYDAFDADKEWMRQYGCVQVVEESVGHETLRPRWKQLMSNLERGDELVVSKFSNAVRGLRELSALIELCRIKVVRIISIHDKIDTDNKLFPDTTPAEVLAMFGALPEEVAVLRKSSDKIIRLQQSISIPITKKSMSKTERDKKIVDMYNNGYSIRDIWKESGVRSKSTVYSILNKYKVQLNRTPGRVPGIRKMGDIIILLLVFLVVGRLLRGVFGGFSKSSFRDDKMTKAEIVAQISRQSGIEKTVVMTVVESFMENVKESMVAGNEVFLRGFGSFVIKRRAEKTARNISKNTTIKIPAHNIPAFKPAKAFLNAVKENKMKKIENNFVVTGFVGKDAEIRQFTNASVARFPLAVSRLENNGEESKRVSAFMNFEAWRKNENTGSFDQLTKGTMLTVEGYFKPEEWSDQSGVKHNRIVIVAVKFYPPVEKEETPEKPAKPAKKGKKMTSAENYSENERKAVVAGEVKEQSVHRHNGARFGCKSAESAGIFVMATKGGTGYRGAAMFPSGRKNRGQKGKRKEPCFSEKRTAAFHEWLVFTKGYGAAKRERMKATIEHSFCPYCDEVTELYFRIINTILFSTDETELRTGMERLQEKTRLDDYFVFGYGKHHLWVCQRRPSNQKKIFEHRVIMAEFMQQVAMKFVQWDVPELEKLKGCRVYQLREQLDNGDKLSREDKNWITRNVKECIHFKRGIALMGYFFDFSDVLKRYFVKQHGHITEYCAIDKTALRSVLYGRIEDVVEVMYEYEKDSEIIGAHCTLLTPYKGYSEGTVVGDFGNKIVVRLSSGKEVVEYRDEVIIYDMANYATNIFYARTENKADLDKIEAFLDDTFDGFVNRHSDSVDAEFTSRWVYPEEEIDRLIASLEAKDKTYIKILSYEFADEYVSFRIFSQGKWDIKLMSPQKVLWLFMQGFTTKYDLCKAERGDFVGNRQAVTLNTRKTMRHNSHQADRKLGCEDKMPMAEVTIKGTSVKLGCSEKRKYRCDYLLFMQIKKQENMIIRVSVPNLFLDKNTSQYKLLIYKILRCEILRYNMDRNFVFKNFAQLITATAPERAGCFAISAEYATFAVTYIAGIADCFGFTLEEVMQQNLDKLASRRERGVIDGNGDNRMKVVDLFNQEEHIFTNRKKRQKGLFDDYDGFVEKFKPKKTTDDCYTPPAVYDYVLQYVADHCDIDGMTVVRPFYPGGDYESLVYPDNCVVIDNPPFSIVSQIVRFYLKRGIKFFLFAPHLTLFGADLDCTRIVCGADIVYENGAKVKTSFLSNMFGESGVIGDPVLYKGIDAICSAPKAELPKYKYPDCVLTVSDVAYIVKNKGEIRIDKREMLHRSALDDQKKHGKSIYGSGFLISHTAAERVAAERAAVKKETIVWELSEREMRIVEKLGQMTHASLFSGIGGHDLVADLPPEFYAWENRDNFAECGADLLTLWCGDKWKNLREFGPGDPFDFRAVPVEYRPFEKKWLYYTGKSRGLMGSPRYDVMKHLLPWWWHFSTPNLLKIVPEMDEGTLRSESETAEEDLQLLPLNMKWIATYNYARVLDLERQARAAGTRQLKSVQLTIFMKTKLLRRLRREGRCQIRVYSVRKDMDGTVVGIRYGYNSDEYAHLWHFAMTSDELKSEAMKIYILRRIAELKGKRKMKKVMFNDRYGLTLEEVMQQNLDKLASRRERGVIDGNGDNRMTHASLFSGIGGFDLAAEWAGWTNAFNCEIDPFCRKVLKYHFPNAEQYEDIRTTDFTVWKDRIDVLTGGFPCQPFSLAGKRRGTEDYRYLWPAMLDVIRTVRPRWVVGENVYGIVNWSEGMVFEQVCADLEAAGYEVQPYIIPACGVGAPHRRDRCWFVAHRADAGSETMRERSNGVHADSIASDTPCLGRITRRSKSNRTIQNEKIGSNIYVPVERSGSKRTFTDPDSERCEECNASCQSGHMQRTTQNSDAKRRIPDWNGFPTQPPVCGGDDGFPGELAGIAFPRWRREAVKACGNAIVPQVALRIFETINEYERKMKKHLLTSFLIGTLTIVLCGIISGEPYRSIAWGVILVILTISVIAIGIATTAIYDLLKQGMNINMLTINGGIRFFDKSKADNPEFLKGGEQMNRTMKQWLLPLICRWFGHKDFEEVYCVKSPRNWFCRQNKPNRYDVVHDIVCSRCWRVHRTILKSRISRAQLLHDGWFIIDEMKSKKAKEFIDGCLNHLVIEMSDHAKWQLRAAMSHTAELAEQEAEERMRDKAIEAFCKDCPIYSIQTSNGGNCPDCSALNAFKQRLNEEMKFTTHCFVRVEDAEKRKDVIEWCMHIGYEYIYPPQEERLGDKVICDTYCVGVAHDAQTFTALNCIDCGTNIELFRALAAMNNENDQEQWYSYTEYPTNESKNGVRRLIFNEHTRFDSFVDVPSGYYRKATVEEIVEYFKNNEKMKTIEERIQEYVANAWVELDQFNEDHVTFENIVTSACVVGANFEYEELTRWRDPKEELPQNGQLVLCKTSDKKLPFVTVKYDRSEWWIYVYPGWAGIGHKIIGWRPIHENEMNTKFKSDYEKACNAYLQAFCEKHGYDYEDATRSWVGGDVGGITECADYIVGMDDIITDIDRDAPEDEFVKYYDYCLRVGSIACGKISTPNYSSWLSGCPRMSEEQITRLEELQRDIRKAERELEEQIRKEKFMFSKIAAAQRSGQSVFVGNIPEKYRTPSKMNKKEAIPKNHPSHRYKYNDLFGICKMLEMIICREARMGVSYRHDFVYRFKAHKSLPFLWRKFKRNIREHIDGWQQELPLFMDEQTKYLMSLLEISECCYPIYVAVICELIESIMKLRDLRIENYDWHVRFYFAVHGYHTRSILFSLEQIECPRPIMERVRENLEKADMDSGFTYSNKTRRRSVVVVGLASSQAQFLNSFEHELRHLCDDIAVASAMPMQGEEVAYLTGQINTMLWKDIHQFICCKGKCDGYGRTNMPADIRAYLEKNGWSFSKKMCEFAVSRMKDRDGKKIEPITKEQIDKLLKTNGIELKHDNGYDCVYVANMARADYWGSSIADEQHLALFVKDFIDDEDAYPGLPFTRYFADLIGSGTNVPWEDVLMRMWEIEGRYRGDGYGEREEIERKMREAYECGYEDAKREMRDGYGERHTGGYMPDGYGERGGEYGSDGYGERRGVRGTGPYSRFRRMFANLTKGAPVYVLDMRGTPKYYMATLEEAPQPYFPAPGNFPPAQPSVSFPVGDQKWVVPVNADMVTKDGLTVTTSRERLIDAINAAKQQSQSVVDSYEKHKANLEVFDQIMREVNPAYAGQAQRDKELQELRAEVGQLRQMQTEFASMKSSLDAFLKSQMSAKTSKSMAVFPFQYVNRRGIPVIKTTGVTVNAADVVFSFQNHAFANSWYRGIVLVELSQAIPAGTTGTLPVLFETNGVTKNVTTYNGANVTVSDIPGTGVFQLFYDKQTDTLQLMTGAVMNEKTLVFDNGGAMDGNLVAALMNGNNRNNGYGNGYGWEWMWMILLWALWGGNGWGGFGGRGNGLSNLPAELNGDAGRQLLMNAIQGNGTAINQLASSLNCSVQQIQTALCNIQAQSGLSAQQIINAVQSGNAQVLSQMASCCCDVRTAIERQGYESQLATLNQTNTLTSNANTQFNALGSKIDAQTQVINDRFCALEMREMQNKLDAERAKSAALAGQLSQEHQTATIMQSQAQAVAPINAAIGDLSNRLAKIECGLPPTTVVPNPQVYAMPACVAAQYGLGFGAAFGLGGNGGFWGMCKSELYRQILGTVSQETEISEERILSKAKNAEIVDARYLLVYFLWRQGFHAPVISSLMNFSRRPIEKMISQFDLRRKQSGKMFEMLLVRIASKLRPTCDMETIKKIGLLFLAFFSFVCIVGGIGTLYYCQVESSNLFATGLIPVGAIYFYLLWPTLKKYLFMGFIVTVVKVVSAGANNHFGTSTEIAEDSILCGCGLSKMTRGLRNNNPGNIRKDGTHWKGEVEPSRDAAFKQFESMAWGYRAMFKCLNTYSRKYGLDTIRKTISRWAPPSENDTEAYIRTVSELSGVPENGRITATNRDVMIPIVAAMSRVENGVDACMTDVMAGWDLFINGMDKIFNKTKKVLEGIATKLSEALMTVQGWLIGLLIVIVNFFAGYQLVLYGVLIAVAFDALFGICVARKRGEFILSELLRATIFKLAVYFNLIVVFVFIDKFVTTGGIETKITTVILGSAICLAEAWSSCGNALIISPNFPFLRLFRKALTGEIARKLNVNPEDVENILNSTKKSFVTDIRKNLIAPNGVAVVKGSSNYAIFTGDIFEVLIGKAGLCIQNGYVYKKDTDHTTWTKIMYETQERAKRITDIHVLWGQSTVIEELIQAGKIDEEYLYPFNGDEVLEWWLVTPWLAERLKEQGEIIIDELGCRWWGRLTSGQAIYMDGVIQEICGNDMNRILTKYNITNLSADNPLSVTYALNERCKMIPESVSLAYFVKVLCTQDPIKANKLHSQSFLLTMNRNTVSALIKESNGLGLIKALPNGYEITDDCFINPPQKDTAHAVYNEICRFCMTKGTNPPQMQVTTRIIDGCKRRNSYYIANPQTDFYFVDNRFFTKSHPPKIAGFLLLLKAICLNNTNSILLMSTKQGTDLGIALIPLAGFCKGTEVIFSKQMNRGILYREPKMSIRTDDLGFVFYEADEQEEKELEYVYAITDSWNYMGDEVIDTFPRRFWDRVCQEKIKAPFTKEMFLQETDIIATIKGFGLDVNKFWWAVLFVYDWSIEKFTKCFWVKLPPKSLTKILDYIGDSKDFEITFRVKGKKSREADPNVKAAVMYGLRQKLKEWKDKEFYRIIDHSTYTTTFTNSSYYMCFAADKFKHLFDALKLPNRGAANEHRCDKEVSYNKMLLISRLFYFMRLTRNVNFKDSDESLKGVLKTYANKLPHTESAIYGFMRQNNKTTTKKSDTMNYEEIRRRISIRAYLAVRGIKPRMFKDKYVFAQLVQFLDRNKFNRLSAKYQGDRYVKSFTCWNQLLVMMFGQLSKSESLRDLIIALEVHWSKLYHLGMGKSVTRSNLAKANEGRDYRIFEEYAYHLVAAARSKSTEKMFGFTGHVYAFDSTTIDLCLEVFQWAKFRKHKGGIKVHTLYDIESQVPAFFHITVAATSDIKVMPEIPYEKGRITSSTVGTTTSPISTRMFLTNNFELPASVIAELYHNRWNIELFFKWLKQHLKIKKFWGTSENAVRIQIYCAVITYCLIICVKHNMKLERSVYEILQIVGISLTDKTNLKELFDKSNINNVNERCDSSKPSLFNFMNTSDIRYLVNTLDPKGIPVVTPAGVLGGHLDAMKFCEHIPQEEYPAGALAAALYLCSGVRGMERGTVSSVRDENGKEILADVELVRLACPRRVFTLSQIKYVIDRLEWLYENRHLIGGLRFTYEPPVLRFFMGGLEPTTDWPARLMEKFRKDFGDSLMKTFLHEGICPIRDILSRLGDKWSLLVLTTLYSNGTMRFNDIQRSLGDISQRMLTVTLRSLEADGLVHREVYPEVPPRVEYRLTDSGGDLMPYLNSLVEWALKNTPAILERRAQAVRAKMAKKVAVLVVNPVNGSGLFQYLETFFENGIPFRTFAVADTTNVKTNSGLRLQTDDIIASLKGHEHEYDALVFACGDAMPKFAENADKPYNVDMLSVIKNFADQGKTIAGHCAAALLFDNLGIAQGRRVALHPFLKPVVKSCIGTDEKAVIDGNFYTAQNENTISCLLPELLKVLKMKTFRLILALAAVALTAVSCVEKSGKYQTLLAQRDSLLTVEQKYDQTLEILNEIETGFQSIREVEDRVMTQISDIENKPLDKKQQMVSQINQIKGILLQNKERIAELEAQFAQSGRKNASLAGTIKRLQEEMTRKVAQIESLQTELSQKNIEIEELAGTVEELNKDIAGLNEVTASQKTTIEEQDSQLNVVWFCIADMKQLKEARIVEGNGLFKTKSIMDGDFDKSAFTSADLRNLTRIETGSKKPKLLTSHPKESYTLTPGEDKLVTLEITDPAKFWSISKYLVIRKMIRLSLIIATYNRSAALVEALRSVVRQDFPAAEWECIVVNNNSQDDTLARFEAFATEHPAINLRIVTETRQGLSHARNRGIDESRGEYIAIIDDDERINEQFISSYVALFDAYPDAASAGGPIIPEYPAGRPVWMSSYTERPIANPIDLGRKIRPFPKGRIPGGGNMALRRSTVQRYGAFDPSLGRTGEQLIGGEESDLFQRLADAGERCYYVPTAIMWHIIPPRKTSREYFESLCCQVGRTQRLRAGMRGQTVRLLSGEAVKWGATLLLALGFLLRFSVPKARYLLLMRRQITRGILKKGMKRVIGIGNALTDMLVNLKTDKVLDTFNLPKGSMSLVDAALQTEISKSVAGLPYSLSLGGSAGNTIRAMARLGCDVGFIGKVGTDKTGDFFIQALENLGIEPFIFRGKERSGRCVSLISPDGERTMVTFLGAALELSAAEVTPAIFEGYDCLYIEGYLVQDHELIAGAVRTAKACGLKVAIDLASFNVVEANLEFLRSLIQDYVDIVFANEDEAKAFTGEGEPLNALQMLSELCELAVVKVGIKGALIKRGSEVVHVGIMAAAKRVDTTGAGDLYAAGFLSGLCEGLTLRQCGTIGAIVAGKVIEVVGTTFSEEAWQHAFQLVEKVRSEKYLFMAAIKCIGVLTSGGDAPGMNAAIRAVTRTAIYNGYSVKGIMRGYKGLVDDEIIDLQSDSVSNIIQQGGTMLKTARSQEFMTPEGRRRAYENMKRSGIDALVVIGGDGSLKGACIFAQEFDVPIVGLPGTIDNDLGGTDATIGYDTALNTIVEAVDKLRDTASSHERLFFVEVMGHTAGYLALNGAIASGAEAAIIPEMDTEVDQLGELINQGFRKSKNSAIVLVAENPATGGAMGLAERVKQEFPQYDARVTILGHIQRGGSPSAIDRIMASRMGEASIEALMEGQRNVMIGMSNGQIVYVPFSRAVSHDRTIDRGAVDLVRILSIMFFVYLTSSNILALGRAKINFARHSTYSYIWLTPNILPLDKTEMKEVKKCSISGIAFTMEADAFQVLSRYLESLNDTYRNTDGGKEIVEDIEARIAELILSHQDNSKVVELSLVEEIIAQMGSAEAIREQEGREAPRGEGRIPRRLYRDMDQARLGGVCSGVAKYFGTSPTWIRLLMFLPLILLLLLGWIPFFWWLVPLMSNLLGVFFICYLIMWFAVPAARTARQKLEQNGQRITVQSIEEASAANHDVDADAKPVVAKAVYALGQVVLIVLKLLAGLLVFGLILGACALIIGLFAVGMAGPEVVSIDAGIWTVSLGIMTALVPVLLLIYVLMCLIASRKPSRRAVLTTFLIWILIIIGLGVSAVRERERGYEWYEIRTESYDPDMELPALPDPGSADNSLLRVDTPEGMVDLSAGEGRVKIAVEDKEDGEKVDIRVGSKGVKITATEPAAECDDFDMKKLMMALLAMMAVLFGTTACGGSIFGQTRIKGSGNLITRTVAVGNFHTIDASRGVKVLLTDEPGDIEICADDNLIEYVRVGIDGGELKITVAPRIHAVPSEQILVRVPYNGNIRKLEASSAAKIVAKTLFTGRMLEIEASSAARIRVDAQVETCEIDASSSAKVVAQIDADRLEADASSASSILLQGAVQKAVFEASSAASIDARKLVAHFCEAEASSAADIRVYCEQALQSRTSSAGSVSYAGPCSVNSADTSGGSTRGAANNELKMVEDNVKAQMRKGILDYCILAILSQGDSYAPKIIAELKEAEMIVVEGTLYPILTRQKNAGLLTYRWEESPQGPPRKYYSLTDKGREYLASLDEAWEELVGQIQMIRHRENDPAMKAERNHARLYRSSDDVVIAGVCAGVADYLGLPSGKVRLATLLLVLVGGLSIWVYILLWIVVPKGPKRLEGNSRMSLFSVSSFLAGFENSPQFTATTQKESTRKRLSNNLEMKETISVNLASQAFTFDKDAYRRLKEYLDAIRRRLPAGDPEILNDVEARLAEIFRSRISSPMMVVTLQMVQGAMAQMGDPSEFGELPTGEKRDEASVDAESASCVSSRHLYRSRTNRSIAGVCGGIAEFFGIDSTILRLITLFLILFGGLSLWVYIILWIVIPSEPLNCISSKSKNLFMSCIFFTVLSHYKYNVKVITMQYIVLFFQQKISFTNNFTSINIKKAPEVNRTLMAAIEQNNYLDVIVKFKAAELGDYFTNGVKVVVVDNNTGKKIYRKRFSKSYLYVFSDGTIEVGKGNALTQIILFKYKDGSGWGMILKERGIYMSKYGYDDTRQTRFRRLLLGMGVAMLLFFLLLKIFFAEQLPFTSLHWKLIFGYFLLLSVAVLVYPVFRKMRDQDRWSIQNGAIEIEEGVLHLSVVRGRETRRLNVEIKNLKIVTSDDVRIRIDTPVGQLTISADKFVTPEEYASFQAELIGAGCKREEMNFYATFSIPFIVGVVTMFVVLIVKYGSWIFGLSAADRMRIVKGIPSRQTPLAVWEVVRESLLHRRIFKVNPLLGYMHMSLAFGWFLLIVVGWIETVAYLGFRYVPLHGHVFFKYFATELPHKPVFDFLMDLLLLFVLSGVTLAFGKRIYSQAMGMHRTTRHVLGDRIALSVLWLIFPARLLAESITCALHGGGGFLTGTIGEWMAHHVNPIVLQTLYEPLWWAYSICLGLFFIVLPFSRYMHIFTEIPLIFLRRYKLHSTEKEGSFDRFQTDACSRCGICIDPCQLQSELGIDDVQSVYFLRDRRYNHLRQSVANNCLMCGRCEQRCPVGIELNTLRLNSRDTMRNTPDEKRYEYFQGVDRSAGEGRVGYFAGCMTLLTPRILLAMERIFKASGEEVWWADKEGGVCCGRPLKLSGETDSARKMMDYNIALFRKHRITTLVTSCPICLKVFREEYHLEGIEVLHHSEYMLRLIRDGRLQLRRGAQTFTYHDPCELGRGSRIYDQPREVIEAVGVLLEPAQTREHALCCGSSVANTAISDAQQLRLARSVAKELSATGAGTIVTACPLCKKAIARGADGREVLDLAEVVAAALVSKTVAAVPDKGVMAAINWGYAINKPRVIDIDSNNLRKSDEILREMPELQTCIGCGGCTATCTAGNLTDFNFRKLHTLVRRGEYQGVYEQMNKCMLCGKCRLVCPRGINTRAVVMLIKRKLGDFMKREVIIVGGGVAGIQTALRLADRGIRPTIVEKEPDLGGKLRGWYHLFPSLTPASEVLSELRRRLAARDVEVMTSAEAVSITPGSVTLADGRTLECGSVVVCSGFTLFDARLKEEYGYGVYDNVFTSADIERMLNEGNVTTSSGRRPRRIALLHCVGSRDEKVCQAHCSRVCCITGVKQAMELKRLFPDADVFNFYMDIRMFGPGYEEMYREAQQNYNIHFVRGRISEASPTYDGRLQIKAEDTLTGRPLRMSVDMLVLLVGMRANDSNADFAASAGLRQAPSGFMEPQDLFLNSARSGVDGIFYAGTVTAPKNIGETLNEADAAVEALTAYLGRVMKRSSWSDYQKEIADDKYYYVRSCIRQNFFPGSEKAFLNMLQKDLGRDVFDDPLHTSCTGIGYHSDIVPLDTIMTVVARQFALMTDAGYENFISSCITSFGIYTEILATWEEFPEKEEQTREYLYKATGREFRKPKSLAHTSDIVFHLREEIARKAKYRLVNAATGEPLRVVEHIGCHYAKIFPKAGIGGSEFPYVLAGMIDAWGGQCVDYPERRHCCGFGFRNYLVQANRGYSVANSHKKLESMAPYKPDFIVANCPGCAMFLDKWQYTIAEMEGVTYGQDGRGIPVLTYEEMAGLVLGYDPWELGMQMHQVDVEPLLEKMGIDYDPAAKYLGRHGKFIGKPAPSAVNCGVQDMIYNIKAQMGKYFDMLMEDVRMREGLHSCMNCGVCTGVCPAAEFYNYDPRQIVNIVQTQDDDAIEELMRSDVIWYCGECMSCRPRCPRGNTPAYVIQALRTLSQKLGFFVESEKGRQQLALKRTIGENILRTGYCVTPKLVKPELHPEQGTVWEWIYENDEEIYGQFSAAYNRPGAGALRKLDDRSMEELHRIFDVTGGKEFFDTIEKHSDRKAREMGYDGADDEYMMDTYTKNSNEHYMIAIIVAVAENGVIGGENRLLWHISEDLKHFKAVTTGHPVVMGRKTYESLGRPLPGRRNVVVTRQNISIEGCDVVHSLDEALALFRPEEKVFVIGGAQIYAQALPLCDEFYLTRVFHAYQGDTCFPRWDEREWEIIDSESFASGKEFPYPFAFEHYRRRKMLSAAVLILSASCSHADRGGKVETEVPRTSMDPEGLGGWQVLVYEGILPEASGDGKTCVKLTIESREHSGDGTFTLERFYSEADACRREVSVRRGRRYTLRGIPENADATVWQLVTEEGNETINLLKGGDDTLTLLDAKQRILPSVSGFELILKEKTIDMQQYLDLLRKIRQDGIVKSDRTGTGTRSIFGYQMRFDLEVGFPLLTTKKVFLKGVIYELLWFLQGDTNIKYLLDHGVHIWDNDAYRYYNELCVRHGVLPLEREAFLDAVRREEPSSIDGYRPGDLNHVYGYQWRSWPRPDGGCIDQIRQVIDQIKHSPDSRRMLVSAWNVAEVDDMALPPCHVLFQFYVAGGRLSCQLYQRSADTFLGVPFNIASYAVLTMMIAQECGLRPGDFVHTLGDAHLYLNHADQVAEQLSRTPRPLPTLRLNPAVRSVFDFRYEDFTLENYDPWPAIKAPMSFMYYFASDIHLGAGGPAAARAVEKRFVAWLDEVSRDADAVFILGDLFDFWFEYKRVVPKGFVRVLGKLCELTDRGIRVVFMTGNHDMWVRDYFEAECGVEVYTSPRIMELAGKRVFLAHGDNMKIDHLPVLRFMNAVFRSKTIRFLFSWLVHPDWAMRFGQWWSGKSRKSHLASEMGDHITDPLIEYAREYAGAERPDYFIFGHMHQPRDYSEGNLRVLCLGEWHSDPVYAVIDPEGNASLKKYMRSRFFISIVFLAGALLAVSCHSSTVKISGRIVGSDCRMIYLEQVTPLAQTLIDSAQLDETGNYKLELCDVDRTPALYNLVCNGDKIPLFLQGGDRLTVSSVGRVVHNYTVEGSEESELLRRFYQPFVAGMQRLDALSSSPETYRMTDEEIRRIESEYWAEYRRIKHEQIKFIVEHKSSLAGVYALYQRLPGETYLFNLDGDVIYYRMVAEAIEERYPESSYLPLLASEIARMDARQNLMSNIAETNFPDVELPDMFGRKVRLSSLQGKVVLVDFWSAELGNSNAINAELKEVYAEYADRGFEIYQIGVDVSKDIWINAVQEQQLPWISVCDFRGRNSPALGLYNVQKLPANFLIDREGIVVARDLYGTGLQRALEAQFEMPEYGRHIHEMVDSLMQIEDRRERNRQARAVIAVMGNLNPLLRDTADFTHKLWDHLFIMSDFQLDVDSPYPQPSRQELTTVPRRMPYSSGHIEYKHYGKYVERMIRRLADEKNPQVVSRTVDNLARYMRTKSYEYNQEHPNNEVIIKDIKKMSGNAIQIDEVALNNIRSDYKQPFMAHPQKGQKGQKGAQQRQQKNRNQHQSRNFNGKNGGARHNTSKMAKVLILDQSKSIRNTLRERLEFEGIAAESAENEAAASVLCERIPFDLIISDHETRLPESDVPFIVLSSEATVDSAIKALRNGAQDYLTKPIDMNRLMQSIRQTLEQAAEAPRTAAKAKAKRSSAGHTEEIIGTSEQMQHVRRLIDKVAPCDARVLITGENGTGKELVARWLHAKSNRAGAPFVEVNCAAIPSELIESELFGHERGAFTSAIKQRKGKFEQASGGTLFMDEIGDMSLAAQAKVLRALQERKISRVGSDKDVDVDVRIIAATNKNLREEIKKGNFREDLFHRIGVILIKVPPLREHSEDIPLLVDHFIDMICEEYDMPRKPMDKKAVEMLRQMPWTGNIRELRNVIERLVVLSGTKITPNDVELYCMLGSFVILDISPRQNANKFAFALGLFVSLARLWAFRPIGAVFTGQEHGSCPFSDYLFVIQGLDMDTKLMIFDLDGTLLDTIGDLAACCDHVLAARGLPLHTYEEYCGFVGNGVMRLVERALPEELRTPETVAAVRADFVAYYTEHIDRFTRPYEGIPELLRELVQRGVRLAVASNKFQIGTEKLVRIYFPSIRFDAVFGQRPGVPLKPDPQVVREILADTDAESGAVLYAGDSGVDMDTARAAGVRSVGVTWGFRDRAELYEHGADHVVDRPGEILELLMKTDIEIARETKLNKIEDIAEKLGVPRDEVQNYGRYIAKVPIHLIDKKEMDKHNLILVSAITPNKAGVGKTTVSIGLSLGLNKIGKKAVVALREPSLGPCFGMKGGAAGGGYSQVLPMENINLHFTGDFHAVTSAHNMITALLDNYIYQNRNSCEGLKEVKWKRVLDVNDRSLRNIVSGLGGSANGIPTETGFDITAASEIMAILCLATDIDDLKRRVGNILLGYTYDGKPFTVNDMGIAGAITVLLKDALLPNLVQTTENTPAFIHGGPFANIAHGCNSVLATQMALTYGDYVITEAGFGADLGAEKFFNIKCRKAGLSPKLTVIVATAQSLKLHGGVPEAQIKEPNKEGLIRGFANLDKHIENMKNFGQQVIVTFNRFASDTDEEIALVAEHCKEKGVGFAVNTVFADGGKGAVELARLVAETIEKNTSKPLKFTYEESDSIRKKVRKIAEGIYGASSIVYTTLAEKKLKEIEKLGIAHFPVCIAKTQYSFSSDPKAYGVAKDFELKVRDIIINNGAEMIVVVMGEIMRMPGLPKEPQARHIDIVNGLIEGLSMAKRIPTPADIFRFYVDGFRSMTLGRTLWAIILLKLFIMFAILRLFFFPDQLAGMSQEQRSEHVLEQLTIPDVSGKMLSDYLQTVDWSRAQFAMTAIYHWLFVPLTLGLSIICAIMETIYYRTGDPFWKRTAKFWMRLFGINFAIGVATGLILEFEFGTNWSNYSHFVGDIFGAPLAIEGILAFFLESTFVAVMFFGWNRVSRGFHLSATWLTAVGANLSALWILVANSWMQYPVGCTFNIDTVRNEMTSFWDVLLSPVAVNKFTHTVTSSFVLAALFVCAVCAWYLLRGREQKMARKSIAVASVFGLVFALITAFTGDRSGAIVARVQPMKLAALEALYDGEEGAALTAVGILRPEAERSNNEDAFYFKIAIPKMLSLMSFRDADAFVPGINDLVNGNPQYGIMPTIEKIERGRVAIAELERFKQARETGDEATLDEIRAKFDPDTPEGAVFLKEYFAYFGYGYLDSPAQTVPNVPLLFYSFRLMVGAGCLFILVLAAAWWFNRRDTLERKRWMLWVLLLCMPLAYLASQAGWIVAEVGRQPWAIQDLMPVGVAASRIASGSVATTFFIFLVLFTALLVAEISILCKQIKIGPEKEMDTLALLQHYWWFLISLLGALLVFLLFVQGGQSLLYTIGRTEHERNLIVNSLGRKWELTFTTLVTFGGAFFASFPLFYSTSFGGAFYVWMLILLVFVLQAVSYEYRRKPNNVFGEKTFDWFLKINGFLGTILLGAAVGTFFTGANFTVDRFNMANLGGDTTISQWTTPWHGLEAVLDYRNVALGLAVLFLSRMLALHYFMNDIDDTQIRERSRRRSLCAAGTFLVFFLVFLVSLLFAQGWSVDPATGIIAPEPYKYLHNLLAMPYVGIGLLAGVALVLWSIWLGWRGSRKAIWLSGSGTVLTVLALLLTAGWNDTSYYPSLADMQSSLTIYNSSSSEFTLKAMSIVSLCIPFVVAYIGYAWWALSRKPQDGSKEELKYMEVRLKRVYDPESPGDGFRVLVDKLWPRGIRKEAFHYDLWAKRIAPSTSLRVWYHGDPAGRWAEFRRKYLDELGSSAAMQDFLDRIRTYPDVTLLYASKNRVENHAVILKEFIEKNLNMYKKDGFITPSEHVNFLAKNLFGACGQIVNGAIAYLAPDGGGPVTPHTHATDHLFIVTQGEAKVLLDGQERIIRENEAFVVKGGIPHSVWNNAQAETVMIGITLKNNENGKMRLFKFYRLKDQGLRISFTKNTSPRSGRRVQMSRNKKRIGHSIAAAHSNDFAALQRQKSCVSVQHFAPVPLFGRARSTSRYRMPPVLPSVGPEATLRTPDFRLPAIRPTFILRPFRTNLSTPKIKKVANECLQPSRPPGRLRRERLPNLRFQKISMNIKRNIIFALESRKKNGVPIVENVPIRMRVIYASQRIEFTTGYRIDVAKWDADKQRVKNGCTNKLKQSASEINADLLKYYAEMQNVFKEFEVQETMPTTQQLKDAFNLRMKESSEEQQEEAPISFWEVFDEFVKECGNQNNWTASTYEKFAAVRNHIKEFKEDVTFEYFNEFGLNEYVNFLRDKKDMRNSTIGKQMGFLKWFLRWSFKKGHHQNIAYDAFKPKLKTTPKKVIFLTWDELNKLKDYHIPHDKQYLERVRDVFLFCCFTSLRYSDVRNLKRSDIKPDHIEVTTVKTADSLIIELNDHSKAILEKYKDVHFENHMALPVISNQKMNDYLKELGELAEINEPVRETYYKGNERIDEVTPKYALLSTHAGRKTFICNALALGIPAPVVMKWTGHSDYKAMKPYIDIADDIRANAMNKFNQLMSNNGHNIEKTNFDAFINAVGSEIQQAQVRLITAANAQMLFHYWKMGNYILYHQQLHGWGSKTIKQLAKAIRLNFPEKKGYSERNLTYMCQFARTYPLRVLQNFIETDAKLIAPSVKKIEDEVHYLNDSQFTQEPLAQIQSTGNKEITITQEPLAQIHNVAKTVSDIYRMEIKDIENVFMASPVAKTNWASHVIMLNSSLPLGVSYWYMKQSVEMGWSSNVLKIQIETNLYSRQISNNKVNNFTVTLPAPQSDLANYLLKDPYIFDLAGTKEKADERDIEEQLVKHVTRYLLEMGNGFAFVARQKHFQIGNSDFFADLILYSIPLHAYIVVELKATPFKPEYAGQLNFYINVVDDKLRGENDNKTIGLLLCKGKDEVVAQYALTGYDQPIGISDYQLSKAIPENLKSALPSIEEVEEELTSFLDKDKNPMAGEIQIMIPQYGELNRIYNDFLISHTFSFDRQKFITDFYKQYNNTKAFEAAILELVLDKPKEQYTLVLNSLRTEIEKNILIYEKHPLFDNEVISRVCYNFAGRYDADIKAQLEVTQKLSKPLNEAYNRYDSIGYRVHTAAEEKQAEKEYERCKAEYEKEKKELERLYELERQARKEAFQYIENCCGDIYKLSFHFMEILAKYIPVAKDKPDEPSKQEKQQDAPKEQPEYFDAELLSLIHKVCVGEQFEDIATQDFYANMNLYSCKKELKIKAREKIRVCYLIFLMSERLPKQDRDKWKNIILKQLDIDENYYKSKYKEPVSDFPSDSNQKFAKEMDAIFRMTGEEFIFLSKHASGQTETQPRPVTDTERKYVYGILGIAKLFGCSLPTANRIKKSGKIDKAITQIGRKIIVDAELALELAGKKTGGRKMAMDYMKEIKDISAEEAVILWQASRLSLSKSYEKAPEILKVHGSVIGTLGNFSASIGKAKSKKTFNVSAIVAATLKNGTVLRYVAELSDGKRKVLYVDTEQSPYHCLKVMKRILRMAGLPDDRDSENLEFLALRKYTPEQRIRIVEQAIYNTPDIGLVIIDGIRDMVYDINSPGESTRIISKLMQWTDDRQIHIHTILHQNKGDENARGHIGTELNNKAETVLLVEKDKSNGDISSVSAMHIRAMDFEPFAFRINDNALPELIEGYKTESKKPGRPEEEKFDPYRHITEQQHRIALEAVFGLKEEYGYKELEDALIKSYTSIGVKLNHQKAVPLITMLRNKRMIVQENGRKYTFMPDFHYMDIQTAKQIRIADYLHSLGYSPVKQQGINLWYKSPLREETEASFKVNIERNQWYDFDAPIQVRFGGRYGKTYCRKAVRRSVPSLRLGEGGTLLTLVMRLERCDRYAAIRILSNGEIRQAGSTSLSSGIYERPAVGGPSPVVRPATVPALRVLSDAPLRHPALVGYLASRGIVPSVAAAFCREVRYEVNGRAFFAVGFRNDAEGWELRSDRFKGGSSPKYITTLKGCNATNDMNAVIDSSAINATNDVNAITDCPAIGAIASFHAGNDPMACESDRAMSASHASVMVFEGFIDFLSYLSLANNIHPVSDTVVLNSVVNLSKAVPFLNRHSVIHAFFDNDETGRKTTSDLHRLCPRSEIIDQSCFYRRYKDVNDYLIARKTCPKPPETVSDSLGRDLRPSKAETAAIESQRRKGVKVMATPKKPYNRQGGRPVLSKSQRQEYRLTVRYNTELHLRLKALARQSGQKPVEVVRQLIAYGMKERVKKEHRPVFDLLKGLSDNLNQLTRLAHAKGIERLEKQIASVVQEVRRLLKYLRDDRMIGKIISGSSFSGTVGYVMKEKSRILEAEGIVPPDAKRMAEDFNDQTLLNPRLKNTVGHISLSFSPKDAPRMTDALMTQIAKEYMQKMGITDTQYLLVRHLDQPHPHCHLVYNRVGNDGQTISDKNIKIRNAKVCRELTEKYGLYLAPGKDDVRRERLREPDKTRYEIYDAIKRCLPRCAGWKGLEKQLEKQGIGVRYKYCGNTDRKQGVLFSKNGFEFSGSKIDRAFSFTKLDRHFTCLQQQTLHWAALLGNLSAAVGNYRSAFAALFGGMGGSTREEPAAPGPGGKLDTIPLPPAGSPGGVSAEQLQRKPGESPEEYIARITALLNAAAEAMAIAAMEHRRRLREQKNRPHVKLMKENNQISLSFEMYEDLKDTLVKAIKNTKAGGAGNAGLENAQLERIERLIEAAERSQGQVAQLLEHLQRHTAQPEIKTEQEREIVNKYDMLLQQLAERLEVIDKENRQTHTLIEQVGQAVEAAAMLKNLPVQEHRHTYTLDIKSSKTALVIFVMAVIIVLLIGFIYRISVSNQQLAANDLKYRYIKMKGEATSKRIAELEEIFELNRDNAKIRQMKKDVEEYEQTIQRKVQLEEQARLKEREAERLNKNASRLKNKMLFVNRPKFLNNHYLYQKIISIKMPDTLTQEQRRRCMSHIRSKNTRPEILVRHELFRRGYRYRINVNKLPGRPDIVLPKYKTVIFINGCFWHGHEGCKHFVLPKSNIEYWESKILGNQQRDKEVILKLQQQGWRVIIVWECEIQKSQLPRIIDKIDSIIKCPMYLCKIRFSRLNTFSVLKNGKNMQDANYKMMKTNKQLIGIDLFAGAGGLSLGAEMAGISMRYAVEADAYAAASYKRNFKNATVFCEDIRKLSADKLNTQPVFIIMGGPPCQGFSLSNTKTRDMSNPNNRMFEEFLRFVDKIAPTWFVFENVYGLTKFKNGEENIQNHIENRFRDIGYTVKSKILYASDFGVPQRRNRLFIVGNRNGIDFEFPKEFDYSVSVDEAISDLPVLGNGEIQMKGEYTVPFEQASPYAQLMRKKSKAPTQNIVSRNKDYVVERYKYIGQGENWSSIPDRLMENYADKKRCHSGIYKRLIGGKPSVVISNYRKSMLIHPHQDRGLSVREAARLQSFPDHFIFEGPVSYVQQQIGNAVPPLLAKAVMKKILTYKMGIYKENIPKADMLMGSMRSMGYSFESAIADVIDNSISAGCSYVSLFFPTDSFQKQAVGILDDGCGLSREELFEAMCYGSSAAEAARSENDLGRFGLGLKAASLSQCRILTVVSMQDGDISAYSWDYNYILKHKKWFVNELTIDEISNLPYIENLREAGKTNDSGTLVIWEDFDVLEKSSHGQVFSTLRELSDKVQDHVALIFHRYISAKKLVIWINNAKVKAQDPFLESNAKTTTKKEFAIALRDSQGIERLIKVRPFVLPFGSDLTEKDKKLLGGTDNLRTRQGFYIYRNQRLIIYGTWFGLKRSELTKNARIRVDIPNSLDDIWGIDIKKQNASIPKSIQNQLKKTVEEAMDISVRKQTHRGRKDNSEDNISHIWDRMRGRNDAYYYQINRNSPLCKYVMEHIPDDAADIVETLLSEIEKGIPVQDIYVDRCNDAIVAADKTQDLEDNFQLGVTLIDKMIKYGRELNDAVDTIMKAEPWCCLPQLKEMLINYYTNEDKQMKISSDEFNDLIMVIKRRIGVDKRNGKTIKYEDIDSYIDKGLEFIPISLTDEDRAEVFRAIETEEAIKHTKGNCIFDDYDDPHNWYEHAEIEDEHFWRLYSKYLLEESSLDDKSIDILDKKTLPAIMNCLCNPKEAHEGRRLIRGLVIGDVQSGKTATYSGLICKAVDAGYKVVILLAGITENLRQQTQERIDQGIVGLEIKRDDITKIEKPKRVGVGKYDKQLLASSYTTQSSDFVGQKDSIFVSLEAQRSVVLFVVKKNVSVLTKLHNWLKYNNYDHSEECVNAPLLLIDDEADNASVNTSKDETNPTKTNAIIRKICNLFKTASYVGFTATPFANVFIDPDSVDEMKNADLFPEHFIYTLPTPSTYIGAKQIFNAGSKYYRNIKYIIDIDEPDYGDGCWRDWARTHIDELNAGAFYYRHQKEWNGILPDSLKEAIYCFFLANTIRDLRGQSSAPRSMLVNMSRFVKVQNVIKEEVERIYDEFKSIVEKDFNSDSCKNTNLPLYKELKQLWDKHYSFVSDVSFERVVRKENLFKAIECIKVLVVNGLKSSGKLDYKENPSLRVIAVGGMALSRGLTLEGLLTSYFYRNTATFDVLMQMGRWFGYRKGYEDIFQIWTSEESAIWYDEISMASEDLKEELKEMFAQRLTPKDFGIKVRDNCQELQITAGNKMRQSFNLDIQESYYGNIYETPYISLNATHNTLNLEQVTWLAEELFKRNLSFDKFKNNTSLIVKDVPKDIVAAFVKNIKSSKVNPSFNTEYILDFITDENTVGLEHWDIVFQSGESDKCYEIPHIASVRCAARTVHVENNAIAASSRRKLLSTQEGAYGLSEDQLNFVKRKCKEQWRKEGKNENREIPNRAYFEHLADRKPLLIIMLIEPVRTEGKDEKKKLSEYREALGGDKMVAFAIGFPGVKGAQNIKHYKANKIYYQQFMQDESEDIEDNETIQMKQYNSQDIYGIFSEGFEQGFFKRVGTARDLDTYIGKDDKGRYAFKFKGQYVPTRIFGSEVISVEQYEDDNSYSLIFLLEKEELLERFCTFCQDLLSSLNGITDQVEGYRAICNRYASWKRLFKPNHGDLTEPEIMGLIGEMLFLKNEMIPMYGTDKAVDSWTGPEKTSKDFSIDSIWYEVKTVSAGKDAVRISSIEQLDSNVDGCLAVYKLEKMSPGYNGVKLSSLANEIMTLISSDFYKEMFARKLMSYGFDWSSDYDNFVYSQSSFAKYIVSEGFPRIMRNSIALPIIKVQYELILSNLEEFKQSMEIGEFRKQFMEQLRFDAEHEGSAPEAQFISRALELLEDIGDVSDPMPMSIEMKGRRGRIMSFDAYAYDEADGALVMIASDFVNEIDNIPTLTNTRIDELFLHMRNFIEESVDGDISAYCDDSDQAINVAKEIKTKVGKSMLATEISRFKFIILSNAILSKQVKNVSREEFLERPVELNVWTIERFHQTYASNSSEIIEIATKDFDCDGIQYLKADIGEDANYDAYLGIVPGEFLAKIYCKYGSKLLQGNIRAFLSVRGKVNKGIRETIIKHPGNFFTYNNGIAVVARSIGFSDDGTKIVYLKDPQIINGGQTTASLANAKIKKEVKDGGMDNLFVPMKLTVLNVDDDMSEDDIERYNNITKTISQCANSQNAVSEADFFSNHPYHVIMEQLSRKRMAPPVNGNPYQTIWFYERSRGKWEQEQMQLSSAARAKFCEKHPKNQVIKKEKLAKCLNAFAMNPHEVCQSSAINFSRFAKTIDSLYETSKESINEVYFSKCVCSVIIFDSLDRRINKADWYPTGGNKAQIIPYAIAKMMAMIPKNMDLDWKLIWQKQEMYPALEKELMKLAHIIHNFFEEEAQGGLVRSMARRADTWNKCKSLPLSLSDEFVSTLISKNEMKQEEAAAKKERKFSHNIDASVEIFKLGADYWTKVCNDLSKEDMLPYGDVAFIGSIAEYIKRNSLPSAAQCKRLVKIIEKAEKKGYIMPMNGKKLTLLVILLLILDQALKIWVKTHMTLGEAIILIPDWFQLYFIENKGAAFGMHIATPGTMDWGKLLLGLFRIGMVVALIWLIRHFMRKKAPKGVLIGFGLILAGAIGNIIDSAFYGLIFSASTPDTVAHFGGHYAGFMMGKVVDMFYFPLFQWNSVPGFLDFLVDSRNYFFGAVFNLADAYISVAVVYLLIFHYKYFNKMAGSESRIVECINLMVMKKVYWTLVAIFVAAALGGCVNDPTEMENAPDMSAGSRKILTSAEAEAGELLVKFSKESIAAVEAGVTRSESTRTGIQPFDAALKEISAVSVERVIPVVEQHEADARASGLHRWYRVRFNDQVSLDEAARKLAAVEDVEVVQYDGYVARNFTEMSAVPYNNVWSSDRDQINTRSGETPKFNDPMLNKQWHYKNTGDETLVSPIKEGCDINVEPAWEFCTGDPSIIVAVMDEGVMYKHEDLAANMWVNQAELNGQKGVDDDGNGYVDDVYGYNFAKDQGDITWTDPEDSGHGTHVAGTISAVNNNGIGVCGIAGGSGNNDGVKIMSIQIFAGRYQSTISRNVDAIYYATSMGASILQCSWGLMSGAINSDEQYLDERSIEANAFAHFINTKRPGSPLNGGIIIFAAGNEAGACGYPAAYPSVVCVTSLSTDFTPSVFTNYGMPADIAAPGGDLYYHKNHSDAGQVLSTVLKLDGMYAYMSGTSMSCPHVSGVAALGLSYAKQLGKTFEPDEFRDMVLASVNDLDPYLTGVKKHNNGTMNLVEYKGKMGSGMIDAYKMLMAVRGTPAITVEQDKPTTISLSKYYGDVTALSCMLEVSDAVKDKLGLTFTVEGNNATITCSKQSAGLVTVKSSVGGTSMSREVAIICRAKAASNGGWLMLPLDLHVLSLPLAFILSQDQTLHCIKNNVLLESMKKLTLLLVSFFAVFALGLTGCSDDPDVKQETPVIKASNPADIAAVAGKVTVPYTVDYAVDGCSLDVTWDATWLHDLSVSADKFTLQADANPGAAREAKLTLTYPEATSVELTVRQMSASESISISPKTLSFSYKGGEETVTVTSSKSWTLEGSADWVEADKTEGESGESVVKFTVSTTNETDAAKEVTFNFVSGSEKAPLKIQQNQEGKLIIDEDSKTISVSNTEQNVTVKLQTNIEPVTATIEEGVDWIEAVDTRAMIDKEFSFKVLANTEGGPRDATIIFKNADASEHIVIKQAGKELTYPAVIPDKVLKTYIMTNFDTNKDGEISKEEAEAVKAIELTGSEIASIDGLEYFPNLETVDFTTHRLLKADFSQCYALKELNLSSGAGLSSVVLPASLEELSVMSCNKLKKIDLSVAPNLKNLYASSAGFVVAPDLSKNTKLEIIGFSSAKFSTIDVSKNTELKSLNVGGDVFNSLDVTNNTKLTNLAVTGTITTLDLTKSAQLEVLNISNTKISEIDVTNCPYLRSIDFGSTPIVEIDLSRNLLLTSALAYMANSLKTVWLSKGQTIESTSNIESFIQYKDYEAGPDAIANIEDEAYKTYLLTFDKNGDGKLDKTEVEAITEINIKGLGIKSLKGVEYVNFTNVRKLDCSDNELTELPVAGFFTNLEEIDFSNNQLTGRIELNKCKKLRILKGSGNMLEEVAFENSVLESVDLSNNQLTRFQCSYNTSTLKSVNVANNLLSESSGFSCSDNAVLTDWNVSNNNLKYVYLHSTPMLENYNVSGNPLVELTLFGAGYGTALKTLDASNTALSSLDISGNMSLQSLNVMGCATLTKIFAGTLDVEAINIEKESYTIIETSTIVDAIKDNAFREFLIETYGSNGGITQEEADRVTDLELNADNAAEVKSLAGIEYFRNLKTLKVSGLESLDDTNLAVGNINLTSVDISLEKGMNSINCGGLKNLTSFSLVVTGAAGTEVGPQRVELSGCSKVQSVTIKDCRALVSVVVSDCAELTSLNLSGSYLKSWLDEEENVHTPSLNIVSNTKLLDPTKFIPADNLAEIWATSAQVEAFGEYFKTNYNWNGKWQTVNNMPTGIFIQVYIRSKERICKSVNYQNAYLPWIEGEDAGAGFLCRIFIYLYLGVFMKTRLSAICLTLTATTMISCYEKKTEDAPWILDRFDDIKILRYEVPGFAELPLQEKELIYYLAEAAKCGRDIMFDQNFKYNLPVRRTLEVIYENYDGDRTTPEWKALEKYLKKVWFANGIHHHYSNDKFVPEFPKEYFLAVAESIPVEKFGDELNALRAVVCEAIFNPELYKTQLNQAEGQDLVTTSANNYYEGVTQAEAEDFYRAMADPADPEPVSYGLNSKLVKDEDGTIRERVWKVGGMYSPAIEKIVYWLEKAQGVAQEPQKATIAALIDYYKTGDLHDFDRYNILWVRDTVSNVDFVNGFIEDYGDPLGRKASWESLVNFMDKEACHRTEVISENAQWFEDHSPVDSAYRKKVVKGVSAKVITAAMLGGDCYPATPIGINLPNADWIRKEHGSKSVTIDNITYAYAQAAHGDGFLEEFMLRPEDRERIDKYGKLADDLHTDLHECLGHGSGQLAPGVKGGELKNYTSTLEEARADLFGLYYLGDPKMVELGLIPSLDVAYAEYARYIMNGMMTQLARIEPGKNVEEAHMRNRKLIAEWCYEQGKADNVIEWIEQDGKTYVVVNDYTKLRKLLGRMLREVQRIKSEGDFEAGKALVEKYAVTVDPKLHAEVLTRYKALDIEPYSGFVNPQYELVEKNGKVVDVKVSYPNDYVKQMLEYSRDYSFLPNLNMYISICMLRDDKRTNSEFEIRYTTIRPTLTHLTIFHSPQKNNQGKLCTSFPMKKIYKYSFSRHTLSLTTIYLAIFLALGIGLYFLYEGGYLSAWFFSFIVALIALMSLSIPRRILVDDEGLHILCLLDITELHPEEIASVRQVEKQELRGYVPYFGGYGFFGFYGHYFDLKNLERVKIYASEWRNFVEITDIYENRIYVSCTQGEELVNDLRELISHARERRAQELQSQETTETRMEQQGTGVIIVAGGSGSRLGGPLPKQFRMLGSLPVLGHAINAFAKTLHSTQIVVVLPEGQIDFWKNLAARFDIAKHTCTAGGPQRFHSVRNGLSALPRTVALIAVHDGVRPLVSSDLILKAVECAAAHGTAIPVVEAVDSLRQLTPDGSRPIDRNTLRIVQTPQVFDAELLRRAYELDYSPDFTDDASVVERAGHAVTLCHGERGNLKITTADDLPIAEAILSSRASREENLMIDPRIVRFIGRHHVLTLATVAGEQPYCSHAFYAYDPERNLFVFAADKTTRHAEEMQANRQVALGIALESKAVGKLQGLQLCGTVREADEEARKTYIRRFPFAALAELTLWVVEISYMKFTDNTLGFGKKLIWNSKEQEMIKQLKPAVALLAGLLFFAGCGRTTTDAEENSDEIIEPNLLYGIPADNYRLEQQIIDRGETLGQILNRYGVSAAQIDQLDKASKDVFPLRNIRAGRSYTAFIHEDSLNAPHLDYLVYEQSISQYVVFRLADDSISVTKGEKEYEIRRQKKTATIDSSLWEAIVGAGMPASLAAEMEDIYQSTISFFSIQKGDNFTVIYDERYIDTLPAGIGRIWGAKFNYGGKTYYAIPFRQGNKIAYWDQDGNSLRKLMLITPLKYTRISSRFTYSRLHPIYKTYRAHTGVDFAAPKGTPVHAVADGTVIFKGWGGGGGNTLKIKHNNGFMTGYLHLSGYAKGIRQGSRVSQGQLIGYVGSTGASTGPHLDYRVWRNGKPIDPLKIPQEPGEPIHKANRAAYEYVRDRIMAELDGEVKEEDKIKQLDSIVLTPSKTADSLVFSSKLMAQQDPQLIKERNRHQKKIRHSQYWFIAIKDSNNSMNYKRNTPKLGMPVSFLYKLGVLLRHRLFDWGILKQEKFDIPVVCIGNITVGGTGKTPMAEMVIAYMAQRHHVALISRGYGRRTKGYIEVTPESHYREVGDEPLQIKRKFPDTVVVVCEKRAEGIRRLRQEHPEVDLVVMDDGFQHRYVEPKVNIVMIDATRPVQHDRMLPAGNLRDLPEQLHRAHYFIVTKCPENMAPIDRRILRKVLVQVAYQRVYFTRFESFRPRPLFPEFVDEELNYGQQVIAMSGIGNPGPFVEGLRNNYKVIEDVRFDDHHVYRVKDMKLVANLLAKHPKAAIIMTEKDAVKMSHPEKIPAEVRKRMYFLPINISFIDDSETDFLQKLECDVRENMLERIKETAAFIQARIENFQPEVGIILGTGLGDFADRIDEKYSIDYKEIPNFPVSTVEGHKGKLIFGLLEGRRVVAMQGRFHYYEGYTMQQVTFPVRVLKLLGIRYLFVSNASGGVNPSFRVGDLMVITDHINLMPNPLIGPNMAEFGPRFPDMHNCYDQHLIIRATRIAEEKGIKLQYGVYVGGTGPTFETQAEYRYFKAIGGDAAGMSTVPEVIVARHMSIPVFGVSVITNCGLSDEVGDHEDVQRQGAKAGVKMAELFMEMIKNLMVNKVILIGNVGVDPEVRTLESGAKVARVRLATTERLFDRQANETKEHTEWHTITLWRGLADVVDRYVNKGSQIYIEGRLRTREWTDKDNNKRYTTEILADDMKLLGRRGDNQSAGAPAGGYAQPQGQPSYQQPAQPSYQQPAAQTPVTPAADDPDDLPFMQLFILNRTNERQTKSVGRILLYALLFFIVTRIAVMLMLTGCTAIYMANTGINPMQGLSFFGNPSVAAAGMGWWALPYVLLVAPFFEECCFRLGLSFRRWQVAVGLGALTLFFVSRFLAIAGAQHSFWWGLPAGIVVAGLLYGFTTDAFWQAKKGWLRPMMWCSAGLFALVHLFAMQGLTWFLVPYALLICLMLFFAGSVMVYLRVNLGFLWAVGAHALNNVPAVFMITLVLMQSMTSQQIAAIAARNTEKARRIIRDTGIIDIWESAGAEINLVGSLSTGLFMKHRDIDFHIYSAVLRPEDDFTALAKLAANPAVKRIEYGNLLATEERCLEWHAWYEDQEGELWQLDMIHIEKGSRYDGYFEEVARRISAALTDETREAILRLKWETPDTEKIAGIEYYMAVLRDGIRSYPDFVRWREAHPLTGVAEWMPMNRIVILGATSGIGLEIAKLYIAAGWQVGAAGRRTENLEALRAAAPDRVKIRSIDITAPEAEELLLLLIADLGGCDLLLHCAGIGYNNPQLDAAREIATAETNTVGFTRIIDTAFDYFRRQGGGHLAAISSIAGTKGLGAAAAYSASKRYQNTYLDALAQLSRMQRLDIRITDIRPGFVDTPLLREGKYPMLMRPEKVAARIVRALEQRKRRIVIDRRYAVLVFFWRLIPEWLWERLPIRTKMSEVVRFFSCRGQKKSSFLKNNRPFMTNYKEKILSLLLTYYFIVSFYSMLCLSGLLACSKDKTEDVPPVPPGSEEIPDKLELKAGDTDFNSLAYTVTAGKDGNEYLHVVYDKSFYDGVVGVFYQPADLLQKDGKRGTGTQSYTVKNGDAYPDGTTIFILGKADYVILAAVCDEKGVIKGEITSVSVTTKEVEYSKAQIVVEQDLDKTTSLALAVKITPDEAVDSYYAVPFEKDDYELNYKDMARPELMKMLLRYSEPLQGVQTKVWDVGIAPNTDYCVVVYGMVGDVPTEIVETVCRSGEPQMALPTIEVTIVPGDGTDGYDPHKSLIVTMKAANASSGYYYFDTKSNYEANLEYGYTDETLPKNYGNPIDSESIVLMLEPEGAVNSHRKLHPDTEYVVIVSVANTEGSVALAKELARTATAPMLPPVESELFTTLQGEWTATMTGRVGGMGGGIEVSFPVTIAAGADEQTAADYRAQNRLVCLGFDYDGALPYFTPEDLMAGKVPGTESYNPWEGNEVAARQDYGPKWFLEIASDGTVSVPADDETLFHYLKNYKNYLIGMSGEGNYYLFGKRFEVEISEDLQTLTVKGYEADGAIYYPSVIYDGYGEYGIDYQGSSDIVLTRKADVARKGATVARTASFRSNRGMKSEPHPVVFQRLSSFARMRMGYKEEKQHQLDMRYLRMARIWAENSYCVRRKVGALIVKDKMIISDGYNGTPAGFENICEDETGKTKSYVLHAEANAITKVAKSANNCDGSTLYITAAPCIECSKLIIQAGIRRVVYSDDYRSEEGLDLLRRVGIECVQIPGEEMDIAASLIKLFFGSKADKDRKEVEPYLVKIKAVYPTIEALSNDELRAHSSNLKKQIANFIAADEARIVELKARLELPDTSLSDKEKISKEIDETVKRIDEKIEQKLDELLPEAFAIMKDTARRFAQNETVEVTANDFDRELAATKDFVKIEGDKAIYATHWLAGGNDVRWDMIHYDVQLFGGVVLHKGKIAEMATGEGKTLVATLPVFLNALAGKGVHMVTVNDYLARRDSEWMGPMYQFHGLTVDCIDRHQPNSDARRKAYMADITFGTNNEYGFDYLRDNMASSPKDLVQRKHHYAIVDEVDSVLIDDARTPLIISGPVPKGDDQLFEQYRPAIEHLYNLQKNLVTNLLAESRQLLGEGKNEEGGIKLYRSHKGLPKYKPLIKFLSEQGIKAQMQKTENIYMQDNNRRMPEITDDLYFVIDEKMNSVELTDKGHEALSKYFNEEGFFVLPDIGARIAEIEKEEITPEEKAQKRDAVINDYAVKAERVHTVIQLLKAYAMFEKDVEYVVMDNKVKIVDEQTGRILDGRRYSDGLHQAIEAKERVKVEAATQTFATITLQNYFRMYHKLAGMTGTAETEASEFWSIYKLDVVVIPTNRKVIRDDRQDLVYKTKREKYNAVIEEIVKLVEQGRPVLVGTTSVEISELLSRMLKLRGIKHNVLNAKQHQLEAQIVAEAGRSGQVTIATNMAGRGTDIKLTPEVKQAGGLAIIGTERHESRRVDRQLRGRAGRQGDPGSSQFFVSLEDDLMRLFGSGRIASMMDRMGLKEGEVIQAGLMTKAIERAQKKVEENNFGIRKRLLEYDDVMNSQREVIYTRRRHALYGERIEIDLNNIMYDFATTFVENHEGVEFDDFRIEMIREAAIQPSFDEAAYEKAKPRELIELIVADLQAAYTRRMKAIADMVRPVMERVYEDRKGQLDTNIYFPITDGHLGYNVPVNLQRCKDSDGEEIFKVFSKVVMFTTIDDAWREHLREMDDLRQSVQNATYEQKDPLLIYKLESFQLFSKMLNKVNADVLSTLNKAYIPVRENTAENVQRERQERAKVDVNKLQASRMQAAAQAGQAEKQKPMPVHVEKKAGRNDPCPCGSGKKYKNCHGKGLMQTINWKGHGAMFGANAIWGLMSPVAKFVMLGGIVTPLAVTDLRIVGAMILFWILSFFRKSEHVPPKDLAKLFGASLLGVVLNQGSFILGVGMTSPVNASIITTSMPLWAMILAAIFLKEPITAKKVLGIAAGASGALLLVLGSGNTDSAGGHSVAGDLLVLFAQLSYALYFVLYKNFVTRYSLTTIMKWMFTFATLCILPFTGRDLLSTDWQALSAAAIGSLAFIVVGSTFLSYMLIIVGQKNLRPTVAGMYNYIQPLVATLVAVCWGMETFDPTKICSVLLIFSGVYLVTTSRSRADAEKSRLQPESPRKRQMEPRADQTAEILERLRTGAAGHACAGFLTTLDPLHLADLLTGLVYDRLRRKYDAAAEIYRISGQNWNQTFYTLLFRYIGDLSNQDTYTELARRATYTMVLRERHSLPRIEALLFGTSGLLDTFRPDDYIRRLRDDFAYFRARYDIEPIDPSAWKTANIRPGNLPRLRIAQLASFLSQHDFVFEQLLACRTRQEVNRLFRTEASPYWSGARHTPEGPEENPKRVGQHKTDVFGINVVSILQYVYGSYIQNEELRDRAIALLECIPAEENKYTRPWIAAGVNPRNAFDTQGLIQLSREYCAAQRCECCPVARRIIDKITRSQMTPEEILQVEKDIVATLKNIYDPEIPVNIYDLGLIYEIDYEPDGVANIRMTLTAPNCPMADMLVEDVNQQVAKVKGVKSVNVILTFDPVWDKSMMSEEALLELNMLMANDKRQDEIIEEFSVFDEWLDKYEYLIGLSDTLPAIAPEHRTDQYLIQGCQSRVWIDARYEDGKVWFTADSDAIITKGIIALLIRVLGGRTPQEILDTDLYFIDAIGLSANLSPTRSNGLLAMIKQMRLYALAFSKKMKKILLVLLLLPGVLPILANTPPRLVINLVVSSMRPDDIDRYRSQFGTGGFLRLTEGGARFTEGSYDYQQTSTPVSLATLTTGAMPSTHGVISTRWRDYIVNKTVGLIDDPSVRDPEYYHGNGAYSPRNLIAPTVGEALLRQSPDSRSVTVALDPISAVVMGGREGMTFWMDSVSCNWTTSTYYLPVLPAWVKRFNADKLYLSYIGEPWHSLLNDDKYRNKRCSDIVLMSSMAKKKRSADTSADAVKRISSKAPSESRYDNILYSPAGNCLTLQFAKTALTQLDLGKRDRTDLLNICLDAPRAIREAYGPESIEAEDMYYRLDQDLEEFLTYVYTLFKPHEVLVILTSDHGSSPSYDFGREACDRFNTRQFEVIVNGFLSARYGPGNWVLEYEDKCLYLNHNLVYEKDLSLADIQNEVATFAMQFRGVSHALSATAMRTSYFGSGYARKMQNSFYPRRSGDVIINLMPGWIEEHDHKRSSSGSMYGYDTRVPLIFYGAGILPRQIDRPVDMTAVAPTLCRLLGIEAPAASEGTVLEEVISSNIMKYKIDTTTWKRREHYEFFNGMDDPFWGTVVPVDFTECYLEAKKRRTSFFLCSLHRILTAVNRIEAFRYRIENGEVVCYDRIHASPTIGREDGSFGYGFFEYFSDLHEFIRAAERETERVKAADGLCLGAGAGRTDLIYFSAVPWFAFTEMKHARSANRGDSIPRISTGKLTRSGDRLTMPVSLDVHHGFIDGRQAGEFFALLENREMKFRTEIRIAPLSVRIGYENRLLALGSCFAEHISGRLSGARFRITSNPSGILFNPLSLAATLESYAAPQEVVPEELGCRNGLWFHYGFHGAFSDGSQKMALSKMNLARRAGASALREADRVILTFGTAWVYELRSTGEIVANCHKQPAELFRRRRLTVEEIVARYDDLQAGPLAGKQVILTVSPVRHLGDGLPDNFLSKATLRLAIDEICRRHADSAYFPAYEILTDDLRDYRFYADDLVHPSQQAQQYIWELFTAATLTEEARRKLPQVEALTTAAGHRPLHPESDEYRRFCRKQLEIIESLPEIDLSREKEFFNQFLMIRKANCKINIGLDVLCRREDGYHELATVMIPVYGLYDVVEVEHAAQTSFRSSGLTVDCSDADNLCMKAVRLMQACYGAGDVSVALDKRIPFGAGLGGGSSDATAVILALDELFRLKLPERELIDCAAALGSDTAFFVRNTPQLCTGRGEVMTPVKLDLRGLWIAVVKPDCGVSTREAYAGIRPGVPAVPLAERIARPVTEWQTFLKNDFEPHIFAAHPEIAAAKAALLDAGAVYAAMSGSGSAVFGLFDDEEKARSRSLTPFVFPLQMEKKIGIASDHAGYEMKEFLVGYLAAKGWDVLDFGPESEESVDYPDFAHPLANAIESGELERGIGLCGSGEGMAITLNKHQGIRAGLVWDKQIAHLIRQHNNANVIVLPARFITNDQAVEFVEEFLATDFEGGRHQRRIEKIPVKACNRQMPCTERAPSKKESVGRTLPSPFYPDTKVCERQPISNYFPMKGTTTQDRLWTGSFLRICLVNLFIFVNFHALLPTFPFFVTYLGGDAVTIGLATALFSIASIVSRPFVGWLIDTRGRYAILVLGLIGMTLIPMGYFVSAGIATAVILRTAHGVFHAASSNASSTWVTDIIPHKRMGEGLGMYGLSMAISTAVAPALGLAVMNAWGFRPLFAIAALTALAALLTGMGIRSRNYAVSDAPLRIRELFEPMSLPAAVTQFFFMMAYGVVEVYVAIYAASCRLPGGGIYFIFIALATVATRILLGRAVDRYGEARLVYTGNAAIVIGILLLVFAHNVPCYLLSALLLGYSFGAIQPSLQTMAMHAVAPERRGAASSTFFVAFDFGIASGGFLAGILVKQLGYDAMFLCMIVPCLLSSGYYYAFGRRHASSFNPQNRRTGLNSDDDRPGLSARKSLPFVITISREYGSGGHRIGERLAQRLGVKFYDRELISLTAQQSGLGESTVQESEQTVSGRLMYDDPVQTAVFRAQSQVIRNIACQEPCVIVGRLANFVLKDRPACLHLFIYADEATRRKRIASEYGVADNRTQSLLKRIDQERREHCLHYTGCEWGERHYYHMMLDSSISGDEQIVETICNVIRTISGRKHPNERKKMRKHVRPTSFFHIRVDLKRFVPVICKKFAFTFSFFVSLTSRMGAILGSFFLGLGIVGVFVPLLPTTPFLLLAAALYVRSSPRLYAWLLNQKHLGPYIRNFRENRAIPLQAKIVSVSLIWLTMGYCIFRVVDAWWWAQLGLFLLAVGTSWHILSFATLRKKEMKNFKGIIYAALSSSTFGLAPLFSILLLSDGFSSFEVLSYRWGVASLTLGIIGLAGGCRFRISRQELCTVFFLSLFRAATSLSLVIAYQNISSGVASIIHFMYPLAVALAMALFFRERISWRTAAAIGVSLAGVALLSTGGIGSRGGDTTAGTIAAAVSVFAYAGYIIGVRKSRAAQVESTTLTFYVMAFGALLFLCGGMFTGGVRLVTDGKERLAILGLALPATAISNITLVRAIKFIGPTLTSIFGALEPLTAVAIGATVFGERFGWTSALGVGLVVAAVSIVVLDTQRKTWKTTPSSSTMDHFTLALMTGAVAGALDIIPMIAQKLSFRSCLSAFLQYFFAGPIVFYSNLPYLPWWADGMAVTLMMALPVVLILTGKDRKAAPVILLNALLLGFLISVAERYLAMQKLRNIAIIAHVDHGKTTLVDKMIMQSHVLRDNAKNSGELILDNNDLERERGITILSKNVSVIYKDCKINIIDTPGHADFGGEVERVLNMCDGVLLLVDAFEGTMPQTRFVLQKALSLGKKPIVVINKVDKPNCRPEVVNEQVFDLMFSLGATEEQLDYKTIYGSAKQGWMSHVWNQPTDSISPLLDTILDEIPEPAVVEGTPQMLITSLEYSSYIGRIAVGKVTRGELKTGQNVTLAKRDGVTMQKSRIKELMVFEGLGKKKVDAVPCGEICALIGIDGFEIGDTICDYENPEPLPPIAIDEPTMSMLFTINNSPFFGKDGKYVTSRHIKERLDRELEKNLALRVEPGANADSFIVFGRGVLHLSVLIETMRREGYELQVGQPKVIVKEIDGKKCEPIEEMTVDCPQEYSGTVIELATKRKGTLTNMETNGDRTRLEFTIPSRGIIGLRSNMLTATAGEAIMTHRLKGFEPWTGEIEMRVNGSIISGETGTAYAYSIDKLQDRGRFFISPMEQVYEGQVIGEHTRQNDITVNVTKAKQLTNMRASGSDEKTSIAPPKVFSLEEALEYIKEDEYVEVTPHAMRLRKILLNETDRKRASKMSQNKNLLQLHCYACSLEIERWDLSANPELKDLRIGGDGYVAFDKVSILDCSNNHKLEVLMANLSQMSELYLDCPELQHLSLEGNSLSALDLSNCTKLVMLNFSGNNISHMNLQCPDLDLLKCQSNNLTTLDVSACPKLTVLYCDENQLQELDLTNNKKIEYLRVPDNKLQNLDASNLSKLKEFYCNNNELTDLMLNSLELTWVECQNNDLQSLDLSNLPALYLLRCYENQFETIDVSNNPELRGFFCNPMESLKTIYMSEGQDQLLQAFEKPEAAEVVYKMREEALRYHAEGQSGKIAVVPTKPLASQHDFSLAYSPGVAEPCLEIVKNPLDAYKYTGKGNLVAVITNGTAVLGLGNIGALAGKPVMEGKSMLFKVFADIDAFDIEVDATDTDRFVETVKAIAPTFGGINLEDIKAPECFEIEARLREELDIPVMHDDQHGTAIISGAALLNGLEIAGKSIADARVVINGAGAAAVSIARLFLKLGLNCENLVLCDSKGVVSTRREDLNPVKEQLATDREDVDTLADALQGADVFLGVSAPGILTPEMVRTMAHDPLVLALANPTPEITYEEAMASRPDIIFATGRSDYPNQVNNVLAFPYLFRGALDVYASTINDEMKLAVTHALARLAKEPVPQEVLKTYGLKSLSFGREYLIPKPSDPRLLAVVATAVARAAIESGVARREIEDWDAYAASLTRRVKNTKMNVQINIDTASCIRCGKCVKVCPAWIMTQAKPGDPIGLRNIDSCIVCGHCAAVCPTGSVRHSSFPPDKIHPIDRNGLPSPEQVLLLCKARRSNRALSDRPVPQEAIDRILEAAHRAPTASNRQEVSFTVITDPAILDKIIRFTLDTFAGIARKLENPFVKPLLKRLRPELYAYLPGFRRLIAEYGKGNDLILREAKTLILIHTPYANRFGAADANLAYQNGSLMAESLGVSQIYTGFVLSALAQDKKCKFLKSIGIQGKVHAGMALGMPLFLYPNYIDKKPIAVNRLMRNLVICFCTLIIAICTCACESNNDVIEHQTGVWVSDKAELLLTDKIMMYFEKQSDDAVLVMLKVDSITEDCTLFSKDTIIRQSIPEDFAMKHISSNEIIVNGQKMVKAETIEMCEPYDMTAANDSNALADRLTEWRLGAWVKVDKTTNDIDAAVNTPRNMFVYNIENGMYYLRAARIENVNEGTLFYQNIRLMKNPNTKERTVYFSPNNQNEVLGALEINLDGFKPGTCYFDPNGGIYWSYMSHTPDQIILNGCGGDTYYINRKLAGDKNMFEWIKYTNKMSTEKNIRNIESDLEFENQIRPRELDNFAGQEKIVDNLRIFIQAALMRGDSLDHVLLHGPPGLGKTTLANIIANEMHAQLKVTSGPVLDKPGDLAGLLTNLNPGDVLFIDEIHRLSPLVEEYLYSAMEDYKIDIVLDKGPSARSIQIELAPFTLIGATTRSGLLTSPLRARFGIQCHLEYYDSSVLKGIVNRSARILDVSIDSDAALEIALRSRGTPRIANALLRRVRDFAMVKGEGHIDLDITRFALTALNIDSRGLDQMDNKILSTIIEKFGGGPVGLNTIATAVSEDAGTIEEVYEPFLIKEGFLKRTPRGREATEMAYAHLGFSRTDHGEQSLFMQKQIYLRFAEAKYLRRSQRYEKADVIMNVCFQKFPGASCLLQRMRQKMDNWQRIDSVIRWANMTINYFALYIGLPRGENLYQIKKGNNGISRNLADKIVTKFPEISLAWLLTGEGQMFADEKLCGVQIPFYQADVESYITRIDELTSDREMVIPQLTGCDLAMLYNGKAMGYSIPSGSIVFLKKMTPDEIIPGLEYVIVCQKIITLRIVRTSERDSEWRLVAADRENFDDIFVKASDIEQVYQVVGKLEIKIMFSGIVERTVTLADIRIEQQNKTFTFRADFCGELKIDQSIAHNGVCLTVVDIAEDTYSVTAMKETLLRSNLGQLQVGDIVNVERSMRPDALLDGHIVQGHVDQTAVCTAVDDAEGSWYFTFKYEPTGDNCTVEKGSITVNGVSLTVCNSQEGQFQVAIIPYTYEHTNFNRIKPGTLVNLEFDIVGKYIARLMKNYLKMPIKTKEFASLLVAAVAAIVVAAAMWLLEAVWWQTLCVACAVFVGMTLLTLFIIRKYVAYKLKPIYSIVLSRNVHTQEILDELKDKHVENISEELTAWADTNDKEIARLKETESFRKQYLGNVAHELKTPIFNIQGYISTLLDGGLEDDLINRKYLERAEKSIDRLIDIVNDLDTISKLESNMTRLKMESFDIAAMTREIAEQAEIEADKKGIKIQVRGADSLPSPFWVCADKHFVGQVLVNLIINSIRYGKEGGLTRIKFRDMLDKILVEVEDNGVGIAKEDVPRIFERFYRTDKGRSREQGGTGLGLAIVKHIIEAHGERINVRSELGVGTTFSFTLKKAQTGYSHMTLPITVVWDFNPVFFSIGSFDIRYYGLMWVLAILGGMLFFDQVCKREGLPQKVSESIFVYGTLATILGARLGHCFFYEPGYFLAHPWAIITKFREGGMASHGAAVGLLIGLWLFSRKNKLPYIWSLDRIMLPVAIGGAIVRLGNLFNSEIVGAVTDVSWGFKFVRLYPNVPIDSIPVQHPTQLYEALCYLVIFGILCWLYYGRDLGRRRPGVMFGVGLIGIFLTRFFIEFIKLDQEAFEQGMLLNMGQLLSIPFILVGIYMIYRGMHRSPVDPDTVRVVRQQTVRQQGGSSKPRKHRRMKMMQDEVNKIVFNALADGREIWFPGVGSLVPEFRSAWRASARQLERPSRRIAFLLSEQRGVSVIDLIARAGACDVAAAEDIYSRWLDKARVEDGISIPGVGELNHRYFRLDSQLDAVLNPLGHDPLPLKRRYSRLPLYLGIALFCTAAVGYGIWQYGEWMRLPFVGDSEKQEVLPVAEVVSSVPARTGSGTPEATGGDAESGAIDSEPVAESRPVETSQDDEAAGVETLSEGATGAGRADLDADYEAPVPEVARMIPGRTYVVWGVYSTEENARRAVAEARARLSDTNFRIYFFGKKWMVSVFESDSAAECRDFMRNAGAGLKEVWPYTKKRMTFALILRRAIDWFYRRPFSCVISETVFRYGACGAITLSVDAVSYALIYHFLVAGRYFDLGFVVMSPHIASLVLVFPITFFTGFWLNRYVAFRTLPVAAGKQLGRYLLTVVGSILLNYACMKFLVEVCGLWPTPSKCITSLAVALYSYLAARYYTFKGISSVKMNNFTFQNPVKLIFGKGSIAKLAKEIPADKKIMVTFGGGSVKKNGVYDQVVAALKGRDFVEFWGIEPNPKIETLRKAIAQGKAEKVDFLLSVGGGSVLDGTKLIAAGIPYDGDAWELVLDEDKIGEVVPFGDVMTLPATGSEMNAGAVISNLATQEKFAFHHSFPQFSILDPEATFSLPPFQVACGIADTFVHVMEQYLTVTGVSPLMDRWAEGILQTLIEIAPKIRANQHDYDQMANFMLCATMGLNGFIAMGVPQDWATHMIGHELTALHGVTHGQTLVVVLPALMSVMREQKKGKILQYGERVFGIREGSEDERIDRTIRATEEFFRSLGLATRLHELQIGQDTIDEIVRRFNERGSRLGEAGNITGDVTRRILELCNKGRNRNRRSGFSNPLRLFTSMDFKLVSDYAPTGDQPEAIAQLLASIRHGSKHNTLLGVTGSGKTFTVANVISQLNRPTLVLSHNKTLAAQLYGEFKNFFPENAVEYFVSYYDYYQPEAYLPSTDTYIEKDLSINDEIEKMRLSTTATLLSGRRDVIVVSSVSCLYGCGNPSDFHSMAIHIEVGEILNYKQFLYKLVEALYTRTERELTPATFRVTGDTIDIMAAFGEFGNQCFRVTFFDNEVESIQSIDPVTGQRIQTLDALTLYPVSLFVTTKERIHTAVQQIYLDLGKQIAFFEQAGRPAEAQRIKQRVEYDLEMIKELGYCPGIENYSRYFDGRAEGTRPFCLLDYFPQDYLMVIDESHVTLPQVHAMFGGDRARKENLVEYGFRLPAAKDNRPLRFEEFEQLVGTTIYVSATPADYELMKSEGVIVEQLIRPTGLVDPPLEVRITDNQIDDLLEEIDKRVRNDDKILVTTITKRMAEELSKYFDRVGVRNRYIHSDIDTLERVQILEDLRAGMFDVLIGVNLLREGLDLPEVALVAILDADKEGFLRNVRSITQIAGRAARHSNGNVILYADHCTDSMRYAIEQSNRRREKQMRYNMEHEMLPRQAQKSGSGQSTLLANTVQTPVTDGILYPLPDNRQTLAADVTSAYSTESIDTQIARAREEMERAAKSLDFLAAAKFRDRMYELQKLKESGYKRMRTIFPAAEKIYDMKKIIILIVCVLSACFAAAQEPVPVLTLGTFHFDFPNLDQVQYAESEQIDVLNPVYQNEIETLVGLLEKFAPTIIVIERPVKMQFETDSLFRRYLADCYDLQRGEDEQIGFRLAKRLGIDRIYCVDEWGKHYDEIDELLRDENSKEYIRFETSFYDHPDSIKRFVPEAVFKEQGIIAELIELNDPEHIRRSLGNYLIGHFKYEFFSNDYIGVDFETGRWFNRNLRIFRNIQRIETGPSDRILVIFGAGHLNLLNYLFECSPEYRLEEANKYLMMIDRETIDRIYAAANIVDIIGEYVTLKRKGVNYQACCPFHNEKTPSFVVSPSKGVYKCFGCGKGGNAVTFLMEHENMTYPEALKAVAKRYGIEVREKEMTPEEVARNDNRESMFVVNSWAAEYFSNYLLHETEGMSVGMTYFRQKRGFSDATIKKFGLGFCPARGDRMSRAALAAGYKEEFLVSTGLSIKRDDGSLFDRFRERVMFPVHNISGRVVAFGGRTLRTDKSVAKYQNSPESEIYSKKRELYGLFFAKKAIQQYDFAIMVEGYTDVISMHQAGVENVVASSGTSLTTEQIRLLGRFTRNITVIYDGDSAGIHASLRGIDMILREGMNVRVVLLPPEDDPDSFARTHTAAEVQEYIRANEEDFLTFKAKLLLKDAAGDPIKKAALINDMVQSIVQIPDPIQRSVYIKECARIMDIDENLLIAEVGRKRMASTGDREAEEFVRRQSARFRAEQTAQRPETVFAGQVTGGSSAEALERELTRYLLKYGHCSFDFKEGRNVVQYNVAEVIFGELDADGLEFQNRVFNEILRVYREQWCALGLGVEVPIHHFINHSDPEVCNVSVDILTSEDHYVPSELWRRKEVHVESDAEMLAVGVPKAVTLYKSKVIERMSRELREKLQDENLTDDEMQDIMQRLSNLNRGKVSIARKLHRLILMADYKNINIRNKRATFDYEIIEEWIAGIVLVGTEIKSVRLGKASITDSYCYFDKGELWIRGVNIAEYGWGTCNNHVPRRDRKLLLNRKELNKIQRALQDRGLTVVGLRLFLNERGLAKVVVGLARGRKAYDKREYLKENDAKREMDKAMKKYRAMQGAVSLRRLFGSEKRFASRGADFGDHSASRSLQGGGDNVGAKVCRRCLDMSLILCIETGTDICSVGLARDGELISLRESDQGRDHARQVGVFVDELLSQTGIAPEELDAVAVGKGPGSYTGLRIGVSFAKGLCYGLRIPLVAIGSLDALTEVAKEDYEAGILSVDRWEEACLCPMVDARRMEVYTRVFDAAGTPLSDVSAEVVTAESFAAWRGDGRPFVIFGNGAAKCAGLLPDATLIQVAPSARGLARLAQEALDAGRTEDIAYFEPFYLKDFVVTRSKKKLFMRTRLRRITIGSYIFMAYITLLWSLIVIFALCYSDLAQGEDLLSGADWCFGLMPVVLWAAIIFAFLRIRTFTFDEAGFTVSYPLLFVRKRIAAEEIGCIEVFVKFCGKGLSFAYRVIHINLAGQRPENIMNMRELDYLHFGEILKVKILKIDYAKCLRLKREYIRENSPSIFDLIFWIGLFLFGDYLVGWMICQLFTRHYEELPAVPLISFVFVCEWLYIEFLLRMRREKERLKIRSMSLLRDLFDLFRSEPDHPATRNPKSKPATRKPARRQKTIVHPIVGEVTLSQSRRARRISLCVRPSGPVRLSYPYGVSTARALEFLESRIEWIQTARDRIAERLAQQPPRPTLSPEEELRRREQLRREAMVVLPSRVAELAVRTGLQYRSVTIRATRSKWGSCNGRNDLSLSLYLMTLPEHLRDFVILHELCHTVHHDHSPRFHALLDRLVGGKEKLLNKELRSYRAYMTENLVFGIRPVVEAIEAGKQIEKLYIRKGAEGQLMTELRDLCLRHRIRTQEVPVEKLNRLTRGNHQGVVAQISPIGYVELNDILERVPEDETPLIVLFDGVTDVRNFGAIARSAECAGAHGLIVPLKNAAPVNSEAIRSSAGALTAIPVCRVGSIRNTLKALQAEGYQVVGATEKSRKLLYDADFRKPTALVMGAEDTGISKEVLKLCDEQLAIPMIGKIESLNVSAAAAVLLFEIVRQRIGMKALILNGSPHPQGVVVQALRTAADTLRQAGADIEWIDVYRTEFRPCTGCMQCRATNVCPLPRDAAHAVGERIRQAGLLVVGTPTYWGGMSARLKMLFERLVPVFMGESALGLPQPRQKGKRALVIAACTTPWPFNILARQSRGAVRSVREILGTGGMKVRTCEIPGTRKMNGKLSEKEARRITARTRRIVRKIEMISLDNLTVSYGGWTLFDNISLLINPKDRIGLVGKNGAGKTTLLRLIVGEQQPTSGSISYNGECTIGYLPQQMRVADTTTLVEETAKAFDEVLKLEAEIARLTREIAERTDYESSDYESLLHRLNEATDHYHILGGDTREADIEKTLLGLGFKRSDFQRATSEFSGGWRMRIELAKLLLRRPSIFLLDEPTNHLDIESIQWLEDYLKNYNGAVLLISHDRAFLDNVTTRTVEISLGKAYDYKVPYSRYVVLRAERRAQQMAAYENQQRMIEKTEEFIEKFRYKPTKSNQVQSRIKQLDRLERIEVEEEDLATLNIKFPPAPRSGQIVAEIKEAGMSFGSKHVFSGANFTIERGDKIALVGRNGEGKTTLARMIVGQLTPTEGSIRVGANVNIGYYAQNQEDLMNGDFTVYDTLDRVAVGDVRTRLRDILGAFLFRGEDIDKKVKVLSGGERARLAMARLMLEPYNLLILDEPTNHMDMRSKDILKNAIMKYDGTVIVVSHDREFLDGMVSKVYEFRNGGVREYLGGIYYFLEKRKLESLQEVERKDAPAKEAAPKASSSGKLTYEQKKEQEKLLRKLRKAVETIEASLADLEKKIADYDRKFAEATQYNEADYKAYNELKAEYDHQMHEWEKASYELEITEGEMQRIISPSMLSADFGHLERDTQMIDRSAAEWVHIDVMDGVFVPNISFGFPVMKAIRKATSKLLDVHLMIVEPEKYVTRFAEAGAGIVTFHYEATLNPKGCIDLIHRAGAKAGVSIKPATSVEVLRDIVPLIDLVLVMSVEPGFGGQSFMPDSLEKIRELRAMIDETESTAVIEVDGGISAHNSRLLFDAGADALVAGSAVFGAPDPQAEIERMLQSMKHISKNIKHRLLYINMLFLCGILSGACNKENEPDITPPSEGEQSNPVEMTFTFDVQTLSPNAAEISITPSDNTQTWYWTRATDKEFTDANKNKDALFKDMLESDIEYGIQEEGFDRAGAVADITHTGPFNNTLQSLFGSTTYHLLAAAIDKEGNPLSEVSQYTFESQKTPVSLNTFSIKIPDEDVSYASARISITPTNQDPYTWFIAVSSQGTPEELADAYIDANGILMNTGLYDIYTGSQIRTINALDPNTSYSVVVFGYQAGRTTSVESASFQTIPAGDPSETVFEFSIDPAKLTARSAEVSVTPSDPSVLYWYELLPAEKYAQYGSNEETVRAYQQQIFTTYEEQGYTIGEIVRGFCARGAVTMSFGPESPAGLLSPETEYIPFAVCMNFDGTLAGEVFVGEKLTTPKATVSSAWAKAWMRAYYDCDQLALLDPELSSLAGKNLLAIDIEISHSSDAAHWYFLGLSADYTDKTKYPEEEMLSAILTNVSTEATLKDETSTLILFPADQQGTFLSMAEDASGNYSEIERVLIGPLSKEGASPIPMSSSMSLSNMQTNIPLTNAYFRTGTNVQTEWPDYIYRLQNTVEPISVRMELKNYSLNNVVFDETGGAKWNAEKKTIALPLRSSAHPDLKQFSLVFHSETETLATGNYPISENGEAGTVSLAKAYFANAPVYINGTLGPSEIGYKTGSIKVEVSPETNEYTLTIDARDSYDIIYQENASAQVVYGSTLTGSFQGSIGEQGGGEDPEEPQYNVWQDTYSNTPAVVSYGLTSDLEGYERSYIGRIDLQPDTEGEANMRLFFINRAPDASAAGFDPTQIEFIPGYSYATLGQDLDDPIFPYVLMEGDLNLSYDSGSQKWTLHYEGFFVAPLGHKIKVIADYVGPMDGFTALMNFASMKFFLVGLTLTAMLSACSDDETSDLIPEPSISISALESEIGALNFSINVENAEQCAYVCMNANESLPTTADEIFATGTSIKLTDKNKLSIRVPVDKQITYAVIAAAANQTGKTISNKLQLTPLKDEDPGTEDPEPKPEQIDITFSTGELLYLPNGMLLINLFETDNTSVYQTQIKLEGIENNGAMTATKITKDASNRTGMHTKIAEPHPIFNKDKNKSNAKANLFTFYNRGKEPKKYNLIYFRNNIVKSFFIHIFILKLFFNQKNALMNTGIVVVLLSLGVVCAVLGLLLLSLRRDNARLSDERAAADEARRLAEESRRVSEEKSAAAEIEIRTLVERSTLAQARLEAAEQRMAEARAEREKMEETFRTQFKNLANDILGEQSRTFKETNREALDVLLKPFRDNIVEFRERVEKIYSSENEQRGALRNELERLMELNRRITTETTNLTNALKGNSKVQGDWGEMILETILDNSNLIRGVHYDTQLNIKDEAGNNLRPDVVLYLPEGKRIVIDSKVSLTAFVGYVGAEDEATRRQYLASHVASVRQHVVELGRKEYQRLLDSPDFVIMFIPNEPAFLAALQNDSSIWADAYDKKVIISSPTNLFALLKLVDDLWKRNAQNKNTADIVTYGTKLYEQLVAFTASLEGVGQSLDAARDKYNDAYKRLCTGNDNIVRCGERLRKLGIPTKKQQSARTLQAADLPDEEMMLRGHICSLRAVEPQDLELLCRWENDPSLWTVSGTIEPFSHYSIEQFIQEQQAGIYRCGQLRLMIDDTAGETIGAIDLFDFEPQHERAGVGILVYDPAQRGKGYGAEALALLEEYARTVLRLRQLWCNVLADNVPSLTLFERAGFRRVGVKKEWIRTPEGYKDEVLLQKLLMTSLTEFFSRQEDDNLKGISHKNNLFKRNIIAHMAVNGECTLSELTKELHISVPTITKLVQELVQENIVSDLGKVETPGGRRPNVFGLASSAIYFAGVNIGRDNMSFLITDLHNNIVKEELLTDFELQDRPQCLEKICSNIAHFIDTCGVERAKILGVGVSVSGRVNPTTGRSYRYFTSSEQSLRDMIEQRIGIRVLLENDSRARCYAEYTNSKSKDEMDVLYLHLGRGLAIGIVMNGKLYYGKSGFAGEFGHIPFFDNEIICSCGKKGCLETEVSGIAIEQKFGRLISQGVNTILREKYNKHEAIHVDEIIDAAKHDDNLSIELIEEVGEKAGKAVAFLINTFNPETVIVGGELAEAGDYLMLPLKSATNKYSLNLVYKDTKFRLSKMGKTASAWGAAMLIRNQVLGLCMKHAYVFPGQGAQAVGMGKDLYDNVPEAKALFEQANEILGFRITDIMFAGTDEELKQTKVTQPAVFLHSVIMAKALGVKPDAVAGHSLGEFSALVVAGALSFEDGLRLVSKRAMAMQKACEAVPGTMAAILGLDDAKVEEACASIDGVVVAANYNCPGQLVISGSVEAVDAACAKLKEAGAKRALRLPVGGAFHSPLMEPAKVELEKAINEAPFQAPVCPIYQNVDAKPQTDPATIKANLIAQLTAPVRWTYIVKNMLADGVTEFTELGPGNVLQGLIKKVNPEAVVESKSTLMPYNGFEKYFIRETESRLASGYQSTEKMPRRSFPKAPFSADAYHPNCPFIGQAKAGLLTRPRRNAFPTPQDQWQKSVAAIHPGIRNTARKRADHLGSSGRTHSSGNCRRLSLRSHLIMKKIAAYLIPVLACFAVGISASFFQASSIAEWYPTLTKPTLTPPNIVFPIAWSVLYLCMGLSLGRLIVRRQHKGIIRLWVLQLIANFLWSILFFTLRNPLAGFIDIVLLNILVGLYIFAASRRDRAAAWLFVPYLLWTLFAAYLNGYILLHGTPAAAPTTIQTESLTISKPKTERIMVHKMPELPYSTEALAPKMSKETFEYHYGKHLQTYVDNLNRLIPGTPYESMSLQEIVKKADGPIFNNAAQAWNHTFFFLMLTPDQKPMPQKLADRIARDFGSVEAFKEEFSKAATGLFGSGWTWLAADKDGKLQIFSESNAGNPMTKGLKPVMTIDVWEHAYYIDYRNRRADFIKSYWELIDWDKVADRIFPRKYHCTACDYVYDPAKGDPESGIAPGTAFEDIPDDWVCPVCGLYKDSFKIVEEKMRTLISILWISFFPLAAAAQGDDLSYRLKKVIKDKKAEIGIAVILDAQDTVTVNNDDRYPLMSVFKFHQALAVADYLDRNGLTPDTEIFIPEEELVPDTYSPLRKEFPEGEISLSVSRLLEYSLQLSDNNACDILFEHTGGPAATDRYVRSLGLRNFAIAATEQQMHDDPQTCYENWSTPLEAAALLELLVTEQILTPTLREMIRQNLINCKTGADRLPKPLSGTGAVIGHKTGTSDRDERGIFAGTNDPGFVILPDGTRYTIAVFIKDSAENPETNARIIADISETVYRYVHDEYRENDIRPGKKHVDQGAGIGFESDYFYMRKNLLAAIVLLVLYIPSVWAAAGYPVRGRVIDRLSREPVAYAAVTITGQPGKGAMTDSLGRFEILQVKPGIYSLTASFIGYRTVVTPEYQVSARTPFIEIEMEEEPEHLNEVVVRPSPFRRTIESPVSMQVIGMREIEKSPGSNRDVSRIVRSYPGVSFSPIGYRNDLIVRGGGPSENRFFMDGIEIPNINHFATQGATGGPVSIVNSDLVREINFYTGSFPADRAGALSSVLDFRLRDGDLERQTFKATLGASEVSLSGSGHVGKKTTYLFSVRQSYLQFLFKLLGLPFLPNYIDGQLKVKTRFSERDELTFLGLVGIDNMKLNLDEKGEENEYLLSYLPRIQQETFTVGAVYRHYAGRHVQSVALSHNYLNNRNTKYRNNDESTPDNLTLRLRGVEQKTTLRFENRSYLGRWTLREGAELNYSTYHNKTLQRTYQQEAELLDYRTYLGIVGWGFFVGADYASADKRLTVSMGVRADGCDYSAEMERFWKQLSPRVSASYALSDSWSVSGSAGLFYQLPPYTALGYKDNTGELVNRGLEYMRVLQSAVGVNWRLRDRLVVSLEGFYKYYTNIPLSVADDVPLTCKGNDYGTSGDELLVSSAQGRAYGLELMVRWQLPDRFNLVGALTVFSSEYRSRHDAKYIPSAWDNRFVANISGTYDFSRGWSVGAKLSAIGGTPYTPYDVEKSSLVEAWNASGRPYYDYSKYNTGRLDAFAQLDVRVDKVFYFRKCMLGIYVDLQNVTFSKLRQPDVLMSTGVIENPSAPPSEQRYKMKYIRQASGTLVPTLGVTVEFMKNNLLSDKLAYNGDTKTRTHLHLCSYTVDRVEEAAGDDFGEMKSRFQPDGITWLQIHGLEDTDAVQTVCTHFGIDFLVMQDILNTDHASKVEEHDQYNVIIAKQIMGGEAMQVSLVQGADFVLTFQERDNDFFDDVMRAIRNNVLKIRTRQSDYLFSVLLNGLITGYMSVAAAISDGLEELESALLADTGDRDIGVQMQELRRDYMQLKRTVLPLKEQYSRLFRSDSSLLHRVNRPFFNDVNDHLLNVAQNIDICRETLSSLMDLYISNNDLRMNDIMKRLTVVSTIFIPLTFLVGVWGMNFRNMPELEWEHGYILAWGVMIVIGFVTYLFFRTKKWRMKKIFSFSLLLILGLVASQILPGMLGESYPAFRAGATTFLYVCLSFIMINVGREFEIDKKRWRSYAEDYFIAMATAAVPWLLIALYYVFVLLPPEFWGNGDAWKENLLLSRFAAPTSAGILFTMLAALRLKRSWMYRKIQVLAIFDDLDTILLMIPLQILMIGLRWQLFVVVVIVFLLLWLGWKKLSTYELRQDWWAILTYSVVVFGVTQLVYLLSKYYFGEEGSIHIEVLLPAFVLGMVMKTRHVESRGERMAASGISFLFMFLVGLSMPLFIGMTAATGEAASSVTGSQPMMSWGVIAFHVVIVSLLSNLGKLFPMFFYRDRKLSERLALSIGMFTRGEVGAGVIFIALGYSLGGPALVISVLTLVLNLVLTGIFVVWVKKLALRTYAPEEFDAVSTIRMEKYSIFRETGKQIGSARLTGRAEIVQMLNQGKSIAAICKEYGIARNTFDRFRRQYTYTIIKGEKKRWRVNGNAAELKEKIHATLMTVSISPMTTIKNRCHQIDYRALAETGEISDDLYYFRLCCLLENAAKCANTASVYGAFFKHLKQSAQKTLVIAPADYQINNGEHEVYNEDANSLIKRIEGDILYLDPPYNSRQYSANYHLLNTIADYKSFTPKGKTELREYNKSNYCSKAKVQHTFKDLIRNARFRYIVLSYNNEGIMPMQTIEQIMTKYGNYQMFQKEHQRFKADKTENKNHLADTTTEYLQAKQNPQMNYIGSKYSLRDFIDNTIKKVVGDNPSDMVFCDLFAGTCIVGLISKHELAKMLQTEVYADETQTAFDILPRLIYKRRNRKAYKVHLQMYLAQHIGRDPILNRALKVNCKNIEMMADFSRVRANDYAIFYVQTSKGKEGKFYGIYQIASDPFLKPDGYYLREKLWINLTFRVLSKPYEVFAKGASEWEALDDIIRYIGPYQMLCSLIYRKLKGNRGNTMLMPYEAERLFSLIRSKKMIPLAFKIMDSVKQHLKVKLKGIVVKNIEGNRGKLGAQNIWKYRALKSDYFLFNRAEFPSTSGAHVRRHEIQKMEINKDNWKQIDLNVDSLWLIPERERQGKHKNIYHGNFVPQLLKRLRMPEIPCWSCSQAAGLPCSHMKTCAKITSDSPPQKNYRLCQMKEFRIKNSIPNEGENIDSVRCSCFIAGIRWGTDGTKELNFVGYIVYMDYSVTIVAKTTLSLSKNAGTGRLAYEIQGADKSSIVEATTNVDWIKNFNYAEPGYVQFDYTALDEGVESRSGQITLSYTGAADVVVTVNQGGTMTFELTIDPKSITANGCAMQIVPSNESETYLCAFMTKEYVDSFESDEAFIQADLEAVKEQAESRGMKLSEWLNILLMKGSKTNTVDDLSLANTAYYGYVYGCTSEGVPTTDLFKAEFTTQNVEMTDLTFTVTSKQVNADPYPDNNPYNVEVTITPSNPDAKWMFSTMNSYVYKVDEWTSKEYLQELQSSARKQRPTLYQGEQKFMLNTSLKNRVWGGNDYYFWCFGMDDNYNINSENAEEYFTVTTGEIPVTDNCTFTVEKLNVTAQDCEIKITPSNLETKYFIGMYPGGSAEKYGKSVCVERLLQRLDMYDSGSGLGDGTPPNWQTNEWVQKGEMTTKMGADQEWRIEPESTYEIFIFGFDKYGHRTTDVSVTEFTTPEYVAPTDFKLEFEFSKIEMRSFTCTVTPSQDDVWYHVGLTSANNFDQYKDWRQFIDAVIHADGGGTLAQYVGEEVLTSSCTPGTEYVAYGFAYADGQAQSDLSSARVESKPLPRNMKATVSGTWQVYNGDELAARYPAAWGNYAGNQYVCVYQAEPTSEETAHTWVLIHAPRGGTLPLPDMLIFDYFENYPFVAIYKDAKHGRCTPPGVGPWGFYYAGQDATGAWGELMYEEILLNDPDHQGDIDTAPTDGFDDKRGEVSAVSTVSKVDLSAPIRFSQASFMQIERERADHGKSSILNAASKKEVSDKLDFDVRAQLKAASEIVKMSLFFGIFFVAPERKVKSNGHCRLSIAIYIVVNRKTGLQISAECMEQRQTPAVGRTIIRSPLKNKKGCLLHIDSLFSFVLHSKNILKHLASDKFCRIVSFYDRTRTTETSLGRRVLTAGNRSKDRQRQASDRRKWRVTKDRQRTTSDGSREQATKSWMKSLLTLLLLSSAWMACAQDYASPEPVEIGKELSRTTFVVYPTAEEAAAGSREASKYFTPLAEWEKTTTEAGTEFSTKFTVPFAWVNRQVLLHVEWASSAYEIRLNGKVAGYCQNGSNPADYNFTKQIREGVNNLTIKVLSNPASAVLESWTHPSEPALGSCYVFSQPTIRIRDLFTKTYRNGSVFNGEVGIVVKTDALNPKKAKIHYELLTPQDEVVTYGSQEIELDMRREDTLRLVAQIPDTMVWSARNPILYTLRLKTQTEGRYTEYVSLKVGFRTVGNTRGQLAINGYPAALKAVPDLGTTVSPSQLLEWKEQGYNLILLPAGGVSGALYDLCDRYGFYVVEQAPINTSRSGMSRRKGGNPSNDPAWQAAYIARIEESYHTTKLHPCVVAFSLAEDSANGINLYEGYLHLKGLEKERPVLYPDAGGEWNSDKLRLSAEQMTPDYPRLNFPAVKLRISQRGEQTTVWDPLRGIYLVLTPEEWVRRHLIGFLISHCGAQPMRIVQEYAVAMNGSPQRADVVVVDDRACPLMLVECKAAGIGIDRQVLAQAVRYNSVLGARYVVLTNGLVHYCYEYAEGRYTRMDRFPRLMKKIILSCAAALLAIGSAHATPKFLSLNNKHGKTTIKIEIPASDRDETNGLSIEDVVLYNSGKTFQAKSVDAIWGDNSTVILQFEKLTAFEDCTLSFSLNGEPVSLDIQSCLADRKMANDRGIELICGLCRFCNADTPFLSKEGKGVSASNSSPKTYNRVLLFVAGRSNVRSERCDFSMLKCIAIDDEPLALRQLQGYIAKINFLKLEKAFTNAIEAQQYLAGNPIDLIFVDINMPDLSGVEFVRSLVSRPMIIFTTAYSEYAVEGFKLDAIDYLLKPFSFADFSRSAAKAQSLYELLAYRKTQGNAPAPEATPRDREYISIKADYKTTLVRISDIVYLESEGEYVRLHLDDRSTITTLFRLKNMEAALPSEMFMRVHRSYIVNLQRIRSYVKGRVFISDSEYVPIGENYREAFQRYIEAHYQNLMIGENLLYLMVWMVIILVPVLNSKMLEEVHVSLENILIAWLKIAPYLLIFIIHNSLIAPRLLLRKHRYVWYLVVNLLTITAVFSLVAIYEKYAPYDTEPYILNGKASFTDLAIYWNILLGFFMTGLNMGIKLLYRSLRDEQQMEELKRQNLQAEMDYLRYQINPHFFMNTLNNIHALIDIDTEYAKSAVIELSKMMRYVLYESGSETISLKKDIQFIENYIELMRIRYDSSIDICLDYPATIPNKVAIPPLLLIVFVENAFKHGVSYNHASFIHIRIGYRDDAVTAVISNSRHEKSRPGTTGIGLENVKKRLALIYQDNYTLSIDDSDPAVYTVKLIIPIMPCMQKTGCASENDEQVPVFFSAFTIFVFVEDRMRFGNLCVQACTIDLTFHYLMLRENLINIYETSFRENYALPALTDYFKQENFTYLEMGAEIAKLHLLFDEAGIRQGDRIALIGRNNPRWCITYIATITYGAVIVPILQDFHANDVIHIINHSESRLLFLGDTFWDAIEADQIRKVEAVFSLTDLNAIYERRDPKKLTDFQKNRENHFRKAYPKGFGPEHIRFHKIPNDRMILLNYTSGTTGYSKGVMLSVNNLTGNVLFARGAINTQTGTNYFQRGGRTLSFLPLAHAYGCAFDFLAPLAVGGHITLLGKIPTPKILIEAMQVVRPTIICCVPLILEKVYRKQVLPLLEKGPMSIAMKIPLLNTALRSVIRKKMMESFGGEVNIFIVGGAPMNMETEAFLMSIKFPITIGYGMTECAPLISFTPDNEFKAGSCGRFLSEFIQVKIDSPDPEHVAGEILVHGEHVMMGYYKNEEETRKVLDEKGWLHTGDIATMDPDGTLYIRGRSKTMILTGSGQNIYPEEIEDKLNNMYMVQESLVLEHNSRLTALVVPDFEQAELEGIDKEELPRIMENNLKELNKLLASYEQVASITVYPTEFEKTPKRSIKRYLYNTALLEKMPGTKQISCVSLFDSSYKSVFVASKYMKIYPIGKIPVFCRKNSGMPSFLFYKAVSAGFDRSDRSGNRHKMANRFLSNKVRNRNHIRIGTKKSDCSISCPNGHSDRFIRPFQIGLSIHGKMILTYYCIITMIIIAYLLGSIPSAVWIGKKYYGIDIREHGSKNAGTTNMLRVLGRRAALPVFLLDFLKGFVAVTLTEILKYDAYINDMWLINIKIIAVFAAVLGHIFPIFAGFRGGKGVATLVGAITGIYPPVVLLCFAVWVVILMMTHYVSLASIVAGCCFPVFTIASPKVNQSVPFIVFSFVTAVLLLYTHRKNIVRLKNGTESKIYIWKPHRKADKMIIKLTILERLIIDLILQIYEKLPDFPFASDYFPQKPQYLNFFRLYLHIQSMINTKALLEPMGSWAWWRSWIQLFVGCAIMGSGFVFFINPYNFVPGGVYGAGIVLHNIFPSIQVGTFGYMFDVPLMITAVLVFGGQFGARTVVAALFTPGFMNILTRLVYSDAAFTADGINLDPALLLGGSLNLSNDLLLTCIIGAVVIGVGQGMVVRTQATTGGTDIIAMLLQKYAGIKFSTGIFLADCVVILSGLVVIGFGLGTGDSSGSGWVLTLYSLITIFICSRVVARVIDGASYDKLLFIISDENEKLRTFILEDLERSATFIKARGMYSEEEKDMIFLVVDRKEVHAVQRKVQEIDPKAFFVVTDAYDTYGEGFKPFPEAGAIQAQMNNEKINTLRPLQGAGRKLFVETYGCQMNVGDTEIVVAIMQQEGYVYTDKIEEADVVLINTCSIRDNAEQRIWGRLREMAHLRRRRPGLLVGIIGCMAERLRERLLEGENPVDIVAGPDAYRDLPRLVREAGEGGRGVNVLLSREETYAEIAPVRLDRNGVSSYIAIMRGCNNYCSYCVVPYTRGVERSRDPQTILSEALCLFENGYREVTLLGQNVNSYRYGAVDFPELMRLVSEISPLLRVRFATSHPKDMSDRLLEVMASKPNICRCIHLPAQSGSSRMLEKMNRKYTREWYLDRIAAIRRYMPDCAITTDLIAGFCSETDEDHRQTLSLMREVGYEFAYMFKYSERPDTFAQRHMPDDVPDSVKTARLNEIIALQNTLSAESNARDVGKEFEILVEGTSKRSDRQLFGRTSQNKVVVFDRGECRIGDYVRVRVTASSSATLQGELVERTRPFEVMRFDELDLEDEVLDGIDAMNFQEMTPVQEQTIPIILDGRDIIACAQTGTGKTAAYTLPLLNRLLLEGNEKNVVKSVIIVPTRELAQQIDMQFQGFSYYMPVSTAVIYGGGDGRGWDQQKRGLQMGADVVIATPGRLISHLTNSRVDLSHVDYLILDEADRMLDMGFYDDIMQIVSYMPKSRQTLMFSATLPPKIRQMAKQILNDPAEVNIAISKPNEAIEQGAYICYEGQKLGIVREMFSRPSESKTIIFSSSKLKVKELAHTLKRMKLDVAPMHSDLDQEKREQVMLDFKNNKVRILVATDIVARGIDIEDIGMVINYDVPHDPEDYIHRIGRTARASATGRAVTFVNEEEQGKFHRIEEFIEREIPKLSLPEAVGAGPEYNPAAFSGHGGRRGRSGSGRGGNGRSGGRGRSRGRDGAKSAGPVPAEGVVAAANVESRHGEGRGEGNRGSRDRGRRRNRNRNRNRNKGGDDTPQAMDKKRLTSENGKPIADNQNIQTADVRGPAMLQDVWYLEKLAHFDREVIPERRMHAKGSGAFGTFTVTHDITKYTRASIFSQVGKKTDCLVRFSTVAGERGAADAERDIRGFAMKFYTDTGNWDLVGNNTPVFFLRDPLKFPDLNHAIKRDPRTGMRSANNNWDFWTLLPEALHQVTITMSPRGIPASFRHMHGFGSHTFSFYDKDNKRTWVKFHFRTLQGIKNLTDAEAEAVIAKDRESNQRDLFEAIERGDYPRWLMQVQLMTEEEARNYKINPFDLTKVWYHGDFPLHDVGILELNRNPDNFFAEIEQAAFNPANVIEGIGFSPDKMLQGRLFSYGDAQRYRLGVNNNLIPVNKPRCPFHDYHRDGQMRTDGNYGATIPYQPNSYGEWQDSPNLKEPPLEVNGAIYNYDERELDSDYFTQPGKLWRLMSAEDQRATCENTARAMGDSALFIKQRHVRNCSYADPEYGKGVAKALGIDYEEALKAEDPAHPTWDPRNKKMKFSKSSKNRVDFPEKFAPTVRSSQKKHIPKEATPVCMAMFLLMKKYLIVALAALAVITAFGILIHQNKKLRRERDAYRNNTEVLLGEVERYQTKSGEQAIRVGELQLRVAELERYRADDATLIRDMGVKKKELEQLTKIQQQTIYKLQGEARDTVFVEVAPDGSSEVPARCAEHHDEWLDFSCCIFPDNSYKADVTSRDRITYVERVKYARFLGFLWRTKRVKSRDQSIVNHNPHAEIIDAEFITIRKMRKVYYNNLLARLLLWRKGYETAMIFGFICTKRKQAQPLSSKAVNHEAIHVEQYMEVTAVALLAALVLSLAFGWGVWPFVMALLLYYVIYFVEAGISWVYNTVRRKLSATAAADTAYYASMFEMEAHANEGDNQYIRSRKSFNWIRYFGKVMNNKQIEFVKKVYPAAVRLAEAGGVSPLFVTAQAALETGWEIRGIGNNIFGITKGSWTGDVSLELTTEYFKTPTVAFKAPERVVSVEQVAPDRYKYRVYRFFRVYPTVDACLDDHLALLKKPMYADAWPYRGDAKEYARRLVDNTGAKYATAPNYAAIMASVIDTVANIVKSLMDWTTIISAAIAAISAGGGIGIFFDRKHKKRAAELANESTVSSQWKELFERSEKKVDDQSNKIEGLYKTIGNMRSQLDGLASQKAVLTLYKCCKVNCPEREPPFGSQEKTHNKNHEQQMKQIVKPIDGVLHLVAYDQQGRELWSLQQSNQIVNGAYEIAAEALAGLPNAAISKVAAGTNGTAPTENDTSITDPTIVDVQTVEYPVPDTVRFNFTFGYMDAAGKSIAEFGLLTTDGRLFARKVRQPIEKTEYMTIKGSWEISGAGMAKTPTEAPKYPITLTIDNYKTGDVEDKGKWPIISLYGVGDADNVADYKIYLFRRTKGRYKFASGPTGSTRKISKTWRHPKHGVSIGQADFALEFGNESLDKAITEFGIEKFKESTLIYNNSRASFGHIVGWMFWYDSGLETTRLCLGLTYKIEKADFDKPDSPNPDYKNFMIKNIGFAAFKNGIQVSEIKEFKVVCSASYGKLEYAVLTDMAQKEDLKGLLEQYFPNNDTGEITEPKIREFLGKVIDLIPEIAGGDLAGTYPNPTVGAKKITAAKIADKTITKAQIADRTITAVQIAEESLNDESIFADEIITGRVIQKNAITAQLLERTLAPCVVDGIKNISISNILTIPITDLFTYNTVNGKWQSAVVNITNATSSGNNADLEINCGDIGIDKVKFSQMPAIIPVIIISDGDIITVNVSVKSEFQGHSYKSDNITLVSQGGYVSLMLAKTNIGYFLMGSNNHTDFMDDKNVIASAISDNELARAFSEMVADRWDNWDLSEFLPYLVDTVAPSALPYLADQFDIDGLQGFGMAETEQQQRDIIKKSIALHKFIGTPWAIREACRTVGFPIVILEEGVTALPGGPESPEDWARFRVFVEADDSRHITAEESRKIHLFVEFYKNERSHLVEVGYYQRIEASEIVFNTNDWLNVEVTTRRRAFSAGFNRGFKMAIDNNIPTFVERDPAVIMAESKAKLEELLGRELQPAQVEQLILNFVVFRETLLVNRFNAGMRQMLYQFSTAPILDYIAGLVAVERLPAASAGCTVRFTLVAGHGSVLIPEGTRVSSSDGLETFRTIDDAIIAPATMTVELSVLADVAGKVGNGYAVGTINKILDPLAFVSTVENIDVTGGGSDVESDAQLRERIKLAPSQYSSAGSRSSYKFYAKSANAMITDVSVSSPVPGSVLIVPLTNEEETPAQVITDVYNVCNAENVRPLTDTVIVSAPEREDYALTVDVVLYDGADAATERASITSALEDFAEEKRAKLGLDIIRSHIAQACRLSSVYDVTVVAPAANLIISDEQFPNCTGITVNVTGFNRGMIAPNDTRNWQVSMDDPAAIVEGVDDIVQSINIILTTIPGSDPLRPEFGSNVYQYLDKPLPSVLGKIIYEATTAIGRWEKRLDVTRISASRNDAAHTVFKIEGTVVGSAEQITITTIIMPVQKSALKAAIKAAMLAERDKTDNPEASADRIAESITNAVAAAIVEGVNTAVITLANTAGPVTGTITASAVMFRLGIISEIGEGENLGYARVSFDENEIVSGWLAIPSMATYKTKHWIPVEVNAQVLCSMDENCEQGAIVLVLWSDTDTPPDWAGPDTMGVKYADGAEVFYDAKAHKLSVNAPDSELSIACKKLNVEGEVNITGDTTVTGEITASVEVTAGTQKIKLTTHKHPTSTGVSGPPTPMETLEKVIAKITISGKNVTADVSPYLSRLSYADKEEAESDDLTLTFEDTADHWKNGWYPEQGDTLEVSIGTPDAPLDCGLFEIDEIGLEFPPDTVTIKAIGAAISKALRSKNSKAFEKQSLKQIAQYFATKHGLKLVGNVSDLQKIEVERKTQEKQTDLAFLSGLAREYGIVFSVRGDQLVFMDTEELESQPVVMTIHKNELSRASFTDKTSQVFGGAVVATRNMKTNSVRRWKIEPSDQEGGKGTLSKDTWQGDVTVENETQAQAKAKGALKEKNKDKITGSITVAGNVKLVAGINIELTDIGKFSGKWHVVSSAHDLDNSSGYVTTATIRKIEVMASFNYTTVDGDRIDLLAAKFYGSMDGIAIISDANPLIPLTAVFPLGTVLVIPIVEDSDMHVNTDLPPWKRMFAQLGDHIFQGMKTPVSTSEADAVKYGQIPRVNDKDAIQPTGAELRELSLTITYSSEFCDPQAEIYALKASMHAFEVLPYITGDGRIVGKFVITSLDIANQQCAADGWVELATVTVNLLESPGEEEAAPTGRALSSQKPIAAAPVAPIPSPAAEITSDVTAAKEKVSGMKQSIAKVKSRTTSLKRGVREVQQLATDAQGLYASAKTKVEATKKIINRAGNLPTSLDEAIAYASNLAKIDNVVDVSVLEMNVGQLSDSAEKVTTSATPVAGFAGTKEGGNMAANTLKLAFILSATDKMSRIVDEAVKKSTDKLSAFERTTGKIGRSMMKAGGVMVGASAAVGASILSVGKATADYAGDMFDMARGSGMGVEAFQKLAYAAKMSGIEAEKVSTSFVKFDRMIAEAAGGNKTYMQTFKDLGIQIKDSAGNLRQPNEIFEDVADIFHNTEDGIGKTALAVELFGKSGADLIPMLNDGKAGLKAFYAEAERMGLVLSDEAIAKGDAFSDQLENIGQQVKGAKLQIGNALVPALSAAAEKIAEVIDKVTRWIQENPELVATIGNIALTVGKWLAILGTAAVAIGGVTFIVGQFGKVFRTVSDAIKIGTKIVSECKNGMLLFRVQYALFSVWSKIAAAGQWLFNTSLYGCPVVWIVAGIMAIIAAVVLLVKYWDEVAAWFKKLWDAIVGIFKAAWEAIKKVWSTVTGWFSNLWGGIKAGAGKAWEGIKNTINKAREGVQKAWGSVKSWFSNLWNGVKNATGKAWQGIKTVFLNYTPHGLIYKNWDKITGWFSNLWGNVKSGISNAWGGIKDWFSNLQPVEWMRGAWENVGTFFENLGPRFYEWGKNLLQGLWNGITSMVDKVVEGMKNIGRRIANGFKSILGINSPSRLFAEYGLNITQGLVVGLDRGGAIVENATEGVAMQATRGITQSMQSSTVNTSTIVGGGNTGPSITYAPQITFAGSTTREARDEFGKMLKQHANEIMELIRKYEENKTRLSFAMAHFTGGGIDSVLDLIVEDYFAYLDRAVEIYEKEITTPRRVVLSGIEKRMGQQALNRKPDLSVRRRLQLYANTEIAEIGITVRKQTELANNKSLTDAERGMHLIAAKILVNGQPIVYDDLMDGFTSEELEKITDFLFPDAKKEVEGGISKNGMNIAKVYDANVYVNNASKHGLASEITAPTITALMTDYKAMGMIGSAEFFNGFDKLETTIKWTYPDNEAQKAFGNFLKPVDLMIRSSKAEYDNTGITDEKPIVMYIRGYSKTLPGGAFKAKEDTELESTVSVQYYKLEIDGEEIVEIDVINNIYKVGGEDLLAERRQNLGLMADFLHGIEHVNVASDVVPVNDIVTAVIGLVGTADKGDTNVLTLCKSAADDAAFGTQGTIPEALKAIRMQDSTAGSALVFVVKVKDATAEITGADIVGEISETGERTGLKLFETAGNKYGFEPMIYIAPRYSALDAVKQELIVITEKTEAMAYIDTPDGWGFNQAIESRGAEGDFATLKAGQKLLFPHVLVANPEYNPDVEDPGERYLTLPVSAYAAGLRAKVDLTEGWHVSSSNHAYTGIEGTDVPITFALSDKTCEANLLNAQGITTVVNMYGNGIVEWGNYTTAFPGTTTPDAFECVRRSLMIMKRSITMACAKFIDVKQVKQADIDLVRNTVNQYYNRLTAEGKIVYGQCFFDPAKNPATELAQGHVTFSNEWTPAVPMQRMTFDHKIDINKLSTIEMKKYEVVSPYVVFSVKAGAGRKEYALKKGDTVELPENDIAVRAMVARRQIKEVAVTTVEPAGSKKKMEQPMTTKADASMSPYERYEDELVTLLQMPGVDVKPLPKIEALELPRQTEKPQIFVLVNGTEFAEREELAVVAQLGTVQCELFIRAKKRRGKLGLFDVYEAAKSRLLGHRMQGAKTPIYFNSFGYVSGLHNYWQYALTFSFAAYSVEADRPDGVPAIKEIKNEFTEKMAKIASSTISNLMGEPAVWLSPNRGNIPGRALFKDPSEPTQIGDSEGYEYRPSTATAEYYEGNFVGLKQAVDAETTEYLEIRGKRYLITAVDTKFDGKTYVAHLTPHAESEEMKNFIQDGKTIEYKVAETAIKSGDVRVIGDVAGVAVTDGAVDETVVLNVTGVYELAKGTGAITQGQKVYAAADGSGIVATAEDNKAVGCAWEAADAGDTTVLVKLNVMGVLYGRALVQPTTIDQEAREVDVVCATEKMVTRFSWDEDYDEMLVCEASAVRMDRANQGLPLLDCHNSYSVHSQVGRTVKVWINESRQLCARVRFSSRPEVAGLFQDVVDGIVKGISVGYEIYKFEREERPNGARPIYRATDWMPIEISLAPVPADIDSGIRTGQQQHPVEIINKRITNTTTNMKKTRATETGKTMEYVVEGDPVKQGDIVTVDGVKGVALSDGEVGDTITLTLIEEEVTPTDSDEAKTNEDVVAAAEDAAAAAEDAAAAAKDAAAAVTEATGGTEQTEENRKRTQAIQQMARAAGLSADYALALVGTDLTVEQCSTAIMRRLAKRSQENGVNGNHSVRATGLDAGTKKRMAVENALLHRIYPSKFSLDAGAREFRGMTMVEIGRELLSERGINTRGLDRSEVAKMVFNRAHSTSDFPLLFEGVINKMLRAQYEFAPEFWDKIARQTSVDDFRARGLYSAGVANGMKKIPEGGEIKYTTLKESKEQIRVETFGEGISYTRQAFINDDLGVFSIIPSAFVRHWDMLRGNLVWGLLTDNVKMSDGKGIFDATHGNLLTGASSALSEESLAAAKTAMMKQKDIAGQIIRMVPRYLIVSPENEMMAKKLVTATTPVKFEDVNVFAGAFDVIVEPRLTDPKAWYLMADPYAVDSLYYAYLEGNEGLRVDSTEEFKTDSMDYAVRGDFGAAAIDYRGIVKAAGKMRISFEISRSRKKRAYEAADKGRRGKAFRLAKSTSVNSEVSAALVTLRDRSRNMVRNNGWARRAVEAITKHTIGDGIQPAPDADLATCQLVKRLWSKWANSTACDWYGKTTFYGLQELAMRSIAESGEVLILRRWVMPDDNNPLPLQLQVLEGDQLDHTRNGSNDMGYCRLGVQFSKEGRLLGYWLFDYHPGDSFIVAPALASKFYPKEDVLHAFEVLRPGQVRGLPIGVSAFMKTSDFSDYEDAQLVKQKVAACFAAFVLGSEDDGGEDGAIGIERLEPGIVEHLGAAESVEFANPPSVSDYDAYASRILQGMAAGYGITYEMLTMDYSRVNFTSGRMAKIDITANFKSWQYFMIVPQICAPVWNWFISACMIKGELSRYISADWTAPRIQQLDPQRETAAQVDRIKAGLATISETIREIGREPEEFFKEYKQDIDRLAELGITIDSVNTAATVVQKENSNGKTGNEMSFTIEQYTALKEAIATGATTITYGDKTVSYRSLAEMKDLVRMIEEELFPERRLRRRRLACIDRGYFSKRMTAIFNEITKFFQGLRPLDRITVSQWADKYRFLSPVSSAESGQYRTSRTPYLRDIMDCLSVHDSHRKIVFVKAAQIGGTEGASNFVGYAMHIAPAPTMFVQPTDKMVERLSKGRIDPLIENCPELKQRVAPAKSRDSNNTITQKNFPGGLLLMVGANSAAGLRSVPIRNLILDEVDAYPQDLDGEGSPIDLAIARTRTFPNHKIFMLSTPTIEGLSAIEREFLETDQNYYHVPCPHCGVMQPLVFANLKWEEGKPQTAKYKCNHCGELIAERHKITMLANGQWVPAKPENVNHDVIGFHLNSLYSPYGWHSWEQIARDFIAAKENPSKLKVFVNTTLGQTWAEKGEAPPYKNLYNRREQYKTNHVPADVCFLTAGVDVQRDRLELEIVGWCADKRSYSIDYRVIEGDTAGTAVWDDLAAVVGERWPRKDGMEFPIRMMAVDTGYNTTHVHTFCRRFVGDRVIPIKGQDHLGMAFSPPKQVDITKAGKKVGKMRQWNIGVSFLKTELYAHLRLEKDENGVPPPNYCHFPEYDEHYFRGLTAEEQVVKVVRGYRKLQWVKRYERNEPLDCRVYARAAAAILGLDRLNPQRLAQMGGATAKKRDARNDESIGRRRGGSFWDDMKKKAPKGWVKISDFEETTGISAKTITAAIKRGYIPDNFADVVGTSATSPYYLNPQQAAVCWYKSLNSAHPNQRKVRNALAGYIKTFDKAVIEPEPTAKAVATATMTYEDAQLQEKIAKARIAELELQEKEGALVSRERINAQLFAAGKELRDTLLAIPDRITDVVMAEDNRAIVHNTIYDAIADALQKLADFQTRIDQMKRIIRHGNSSKMAIYVRKCPCGCQFEYGAADVDETFFDPRDRVTMWYVECPECGNKTGFEKPDPVRYEQEMEIKITQEKRGEVERIQNEFRSKLSPNEILRGTAQGVNSALSGAVPLIKKSIKERYNINKKYLNRQIKVSPKAKPSRLWGGIKVNQRHIPIIAFNPKQSGSHISVVIRKGKTTMIRHAFIATMTSGHEGVFARGEYQGKNFVRGKFPPKRKNTKGWLITELLTTSSFRMSLAPDVWPKVSRFIGNEVTARVHGILTSRVNKIAAKNRMKKSDKDLANDIRRRANAANVSISQLCREAGVSRQWYEDLKRRTPQPVDLYLKIDEKLKEYERGEAATHTADAPLQMWRLTDTSAMPYGKYKGRPMSGVPADYLLWLHENGKCSESVARYIEEHKPAIEQRRDTEAADRKQKTADRMPFGSYKGEVIAKVPAEYLLAMYESGKCPANVQEYVEQNMAELHLRAERDGRCRNALKSMYLMGNLTLKELGRRAFETAKAKGFHDEPIDLPRALMLTVSELAEALEADRKNKRADLSAFFDKEPCEIFPFREKFEVHVKDTFEDELADATIRLLDLSTALGIDLEMHVLLKMQYNKGRGYKHGKRYMKIIVTFSGGKDSLAALLWVREHITTNFTTVFCDTGWEHPLTYEYINRIADRLNLDLVTLKSPKYDGMVGLAKQKKRWPSTRARFCTQELKTKPCIDYVLDNVQDNMLMIQGIRAAESPNRAAMSKQCTYFKYYFEPYGYDKAGNPKQHTYRGRDVRVFRKQYADDLLRPVFDWSAQQVIDYILSAGLEPNPLYTMGYKRVGCWPCVMASQRDILNISRQSPDRIEQIATLEHDLKSSFFGPDKIPAHAITSGEKYPTINEVVQYVKWQNATGSLFDDDTATSCMSFYGLCEMDMKKRIIRVFPTKTNATPTDELVRIRETPSFFDKADEVHVSVTFTWDIPIAEWLAKQWEPVATVKIGGPAYNEPGGDFIPGMYMRHGYVITSRGCPNRCWFCAVPKREGGMLRELPVTDGWILTDDNLLACSPGHIDEVFAMLARQPHKPQFTGGLEAALLTPTMAQRIHELHPQSLFFAYDTPNDLDPLVEAGKMLIEAGFTKSSNSMRCYVLCGYKGDTFEKAQTRMGEAWRAGFMPMAMLFRDLEGKYSTDWRRFQRQWANPTITICNCIKHFGRMEPANPLHAEIRRHVREVQRTRRATNRMPADALVIRDGLMLKTRFSQSLTAFRAVLEEMVALRLIEIGRTINDTYVRVIEDMKSINLFGQEEHVFTNRGKSQKGLFDDYEGFVEKFKPKKTTDDCYTPPAVYDYVLQYVADHCDIDGMTVVRPFYPGGDYESLVYPDNCVVIDNPPFSIIAQIIRFYLKRGIKFFLFAPHLTLFSANIDCTRIVCGAAIVYENGAKVNTSFLSNMFGEAGVIGDPVLYEGIDAICSAPKAELPKYKYPDCVLTVSDVAYIVKNKGEIKIDKREMLHRSALDAQKKHGKTIYGSGFLISHTAAERVAAERAAVKKEAIVCKLSEREMRIVEKLSGQMIRFLYIDLFCGAGGTSIGVEAARLHGEQVAKVIACVNHDANAIASHAANHPDALHFVEDIRTLNLDRMLAHVEAMRKQYPAARVVLWASLECTNFSIAKGGQSRDADSRTLAEHLFRYIDALRPDYIQIENVKEFMTWGPLVVKVVEASAGHGEYCPLAIKTEGTGKHKRRTIAPVWVPDAAHRGEHYRRWVDRICADGGYRFDHRILDSADFGAYTSRRRFFGIFAAGRLPIVFPTPTHTKKPAPNLFDARAKWRPVRDVLDLHDEGASIFGRKKPLVDATFERIHAGLVKFVAGGKEAFMVKYNSMSQSGKYVAPGIDDPCPTVAVQSRLGVAKACFLAKHFSGSPADRAISIDGPAHAITTVDHHSLVSGNFLTAYYGNGYNSPVEAPAPTVTTKDRLQLVRPRFLNMQYGNGRTASVKVPAGTVTPTPKHRLVTCCSETPARKGRYLLNPQFASAGAPIDRPCFTLIARMDKRPPSIVTTEADVQHLAPFIRHDVDTLIYEVYATDSPIVVQIKEFMALYGLVDVKMRMLKIPELKRIMGFPANYKLVGTQAEQKKFIGNAVEVTMARVLCEALGRVILDFENAAMQINTTYNMDALAAARLLPDDCVDCIVTSPPYYGLRDYGVDGQIGLEETPEVFIDQLVTVFRELRRALKPEGTLWVNMGDSYNSYKGNAVRKNAQTDYAGHRGQPVRKSGFGLECKNLKNKDLIGIPWLLAFALRTDGWYLRQDIIWHKPNPMPESVTDRCTKAHEYIFLFSKSAKYYFDAEAIKEPATGWNESKFEDGKNLINRPNVGKNRQRKPAGWDTGKGGHGSFHRSGRAEAIEYTEIAPEASMTRNKRSVWTVPPQPFKEAHFATFPEDLIVPCILAGCPAGGLVLDPFNGSGTTRIVANKLGRNAIGFELNPEYIEIENRRRSKELGMFENITLMRRRSTDNTDTMTVSEFRRLISGDLPRNSTTTPIGNRKVLNATKTEENGVIFDSRLERYMHDLLKSHGIGFLFQKRYTLQEPFTYNGENVRAITYTLDFYLPDYDLAIDTKGVATQQGKLRIKMLKRLFADLGRTTTIELPRTKDECAALVARLTSNRMARPRKLNADWFPHDVNERNKPMVKAIRRKFSHLGYAVWTYLQETLTSSDLFRIKWDDVTVELLAADYDVEPEDLIAIVEYAVKIGLLEIGDGFIFSAEHRNGLKPLLLKRERDLLFLDNKAKSKTDAGGAEIIDAENEPKTSENTTKKERNPKNEMIFDAENVEKTEPAGVFDAENRRKQGFSSIIGEFPFFKSKSNSKSNTHTVIPTWKGGVGENQTAEFLDWLDSAYPEIAAMAEPITEEQARDILAKFSAEDINRIIAAMDNKGAYRNKSAYSTFASFVAHDIIIKSRKADTGRKYTYNEVIAEVDGGRGAWDDFQFLAMPDGTKYWMRKIDIAAIQAMNKPDTCPGYSADIDTEYNRVTENGTKVCGSCNCFKYEDANGYGECEHHDVPESYFEARHCSDYCGNWIPKTKMEWNNHPFEKDTPVRTFGSRSELAAWDAENCDRCIKHDECELCDAIMAAYIGDGRVPLWVAKRIGCLYDPLYLSARLKSTCRERRTEEERDFPFMEQTFEQMKDAAKEVHRRFYKYCDSSFNDIVNTDNVRDLRRVVIRYRDYVSDPRAAHYIRENYADVLEALGLRIQFYIDGRVRLYLANMGKMYRRWDKFEVQDVIARYLSGEDVQAIAEEYGRSVRSIEMMIYRQGLHRREKSSADDRAKLDCMPDPFEWMGGKKNLQKTVMNHEPLDRLHLQQIAAAYAAGYRMARAELADDTKYYTLTQCYRKFGRGTVDRWAAEGLIEIIKDGTRNSKCRVLAERIELVASQSNRASWFDNHEMAELVRTVNFTETFAALRLGESVEFSVAEFTESSVRANASRYCKGKNIKLSVSALRGTGVIKVTRKSMREIRYRGIGIAERKWVFGSLWFDTRNKATLIWSEEVEYWVRVDPATVGEYTGLKDKNGKEIYEGDVIRSPLSEDKTRPHRIFYHTGNAAFMGALVDRKELCYLRLDQDWIYKFGKEVIGNIHDNPELIKMETTERINIRGTIRSLEEIGSKFIFPRNEDYKPSTIRNTAVSVKADTGRGFKVEVAADRITVIRIKMQKKFDYFDVNKRIIQIMKEKGYNKNSLAKAMGMAQPTIKQIENNENLPSLKFLFEFKDVFPDINFNWILTGKGNKIDLVGEYDIKHEGVIEYDMDAGGYSMRYHDGANDRTVTDKNSERIDKLLDIVASQQKTIELLAQKGAAGDVPGVAGKAVQGMLTPDYPIKDAAQPYNLNITTTTKRITKLDILLFHAFSEMDFKDQIKQLSERVVKLKDNIQTEEATKTAFIMPMIQALGYDVFDPTEVVPEFTCDLGIKKGEKIDYAIHKDGQPIVLIECKHWKEDLNSHNGQLFRYFHVSNARFGILTNGIVYRFYTDLVEKNRMDEKPFFEFNMEKYRESQVEKLREFHKSYFDVETILNTASELKYTNEIRNAIVKEVNDPSDEFVKYFARPVYPGRFNDITLEQFRAIVKQAFAQYANDYMNERLKSAIGADTVVETRAEPKSEPASPVAAPSEEPVCECENKVITTEEEIQGFYIVRAILYPEIDDISRVVHRDTQSYFGILLDDNNRKPICRLHFNTSNKYLETFDAEKNGTKHLLESLDDIYKYRTEIVAACKMYMELQPIQSKIYEIRGQRVMLDFDLAELYGVTTGNLNKAVKRNIERFPERFMFQLTQSEALRFQNGTLNETTGKTKRGQHFKYMPYAFTEQGVSMLSAVLRSPTAVQVSISIMDAFVAMRNYITTTTQITAELSEIRAKLALLERADEDNAEAVNDLSEDMRKELDNIYQAIAALSIKVPQARKSPQPIGFKRTESDGNKMTQKQAIQLFEERKVRTVWDDQTEEWYFSIVDVVGVLTDSVNPTDYIKKMKKRDPELSKGWGQIVTPLSVQTAGGRQRVNCATTQGMFRIIQSIPSPKAEPFKQWMAQVAADRLDQMQDPELSIQQAMVDYKRLGYSDNWINQRLKAIEVRKDLTDAWKKRGVQEGQQFATLTDIITNVWSGFTTREYKAYKGLRKENLRDNMTNTELILNMLAEASTKDITEATDPRTLAAHKAVARQGGTIARNARLELEARTGRKVVSPLNAHQVLQIEKTDEAELQAEDEEMEKVKVIIEWASDGTISAMMEKDMFAGMGDTVKAAVADMKEGVALYIKTAKEMGFPYKAYLDGAYEIELEYDAVSALKYAREYIKDTKLAELTGIPAAQLGRYANDKSKPRPAQRRKIIEALHKFAAPFYSIVLMKSSELHRLILKNGWRSIRQAGSHIIYEKDGKTVSVPFHGSKEMGSGIARRFIREMGLKMKSCGCFLFGGEYEARTRDLLHAMQVHNFKVKFPKNLPHSAFAIKSTFYTRLILHTFTHISVKICSFVCPLFVQNSKHMPTFSIEIREKNERRDGKFPVSIRLTHKREVRKISTGVYVSRKQVKPDFSGIKDTTILKGLLNDISKYEDMLAKGLGTDLSRFSAADLVKYIESQKATEGGVGIDFIAFCDNHIEALKAEGRDGTAGRFEAVIHNLTDYFGRSTVFVKEINVKNLQGFVEYMQKPHEQMRTNQHGKEVTTQRLGCKAQTVKDYLADIHTLFNAACDHYNDEDAETVLITHRPFGSKKLQVEVKEEPEKRDLSVDDLVKILKAEAVPGKRMQLARDVLALSFYLLAMNTADLFGADVELEDDRITYHRQKTANRRKDEALMSVKIEPEALSLIEKYRDPDKRRLFSFYKMYANFRDFNHNVNAGCKQLAVHLGIDVSLSTYYMRHTWATLASEECGISETDIALALNHVGVASGFESGKSLKTTRGYIHRRFTRNDTNNRIVLDYVKSKYMKKFLLFAFAAVMLGFAGCNDDENKDNIPPTLREYEAPVFMYGKTREEVKASVPYAYSGASETSLYFEGKGIVKEYIYIFEDDKVYSCGSILSDLYIDDLHTYLSQLYIYLEYRPGQRMYVYESEDKSLSIGLYPLNDGLAAVEYLKNMSLVAIVGRPNVGKSTLFNRLVGQRKAIVDATAGTTRDRHYGKTDWNGREFSVIDTGGYSVNSDDIFEDDIRRQVMLAIEEADVILFLVEVNTGITDLDQMMADILRRTSKKVLLVCNKVDNYDLIYSSHEFYSLGLGEPYCISSMSGSGTGDLMDEIVRDLPPETKNEEEELPRITIVGRPNVGKSSLTNALLGEERNIVTPIAGTTRDAIHSRYNKYGLDFYLVDTAGMRKKGKVTEDLEFYSVMRSIRAIEESDVCILMLDAQQGLESQDLNIHNLIVRNRKGCVIVVNKWDLVEKGNNTMKEWKEALAKKLAPFNDIPIIFTSVLNKQRILEVLQTAIRVYENRKRRVATSALNDYLLPIIENYPPPATKGKYIKIKYVMQLPTPTPQFACFVNLPQYIKDPYRRFLENKIREEWDFSGVPIQIYFRQKMLLFDGITLPLEDPILKFLLILVIILAAPLLLNKLKIPYLLGLIIAGAVIGPHGLNLVLRDSSIILSGTAGLLYIMFLSGLDMDMSDFRKNGTRSLVFGLYTFCVPLLLGILAGYYILGFSIYSSILLAGLFASQTLIAYPIVSKLGIARDKAVTIAVGGTVITDTLALLLLTVIVGMVTGNTDDMFWYRLGISVVLCIAFIMQLFPLIGHWFFKHCSDNISQYIFVLVMVFLGAYLAHLAGLEPIIGAFLAGLALNRLIPRTSPLMNRIEFVGNAIFIPFFLIGVGMLIDYRAFFRDWESIKVAAVMIVLITAAKYIAALLTQKTFKLSSDQRTVIFGLSSAHVAATLAAVMVGYNVIIGQTPDGEPIRLLGESVLNGTILMILATCTISTFATQRGAHNIAIKGVRENDESTEHQDEHILIPVSNEESVRELVTLGNVLKSKKNHNGFYALHAIDNKVEDSGLEKRARKILETAATAAAASDIYLHELLRYDVNISNAIASVAKEQSITDIVMGLHRDKSPAIFLGKITGDLLGESNVTTYIYKPVQPLATIKRHIVIIPSQAEKEAGFLMWLHKIGNLARNTGTKIVVYAPETTLKYIEPLRRKQTATVETVLFKDWEKLPALLRELRTDDCLWLVMSRRERISYQPAMNKIPAYLDQYLGRNSFVLIYPVQAGDPESRYLMPEKYRKARIVCRNLNERLFQCEQIAPESERHSFCRGTACMVILRKQRMNVEGRAMTERRVDKRLLAPVLMGFFIMGFCDIVAPVTNIISGEFAESQQSAVSFLPSMVFLWFLLLSTPVAALMNRIGRKRTAMIGYAFTIAGLLVPYAAGVGSALSWYFIGFGLLGIGNTAIQVAVNPLLATIVPEERMTSYLTVGQIFRNTALLLLAPIITGLVSLFGDWRLLLPIYAGLTLVGAVWLQVTAVAEPAQSSRAVGMAECFRLLRNRAVLLCTLGVACFIAADVGIGFVSVRLIDNPDSILTTTGFYALRIVGTLVGAWVLIRVVDVKYLRWNMLLALALCIALFAVRSEAVVYALVGILGFTMACVFATFYAVATKSAPGRSNEVAGLMILAISAGALSGPICGALIRGFGHPQAGLIWVTACVCYLLWAAAVLKSDTKKMKNCKFLIIALLLSILTLPSSGQSRRYDDYGRSSRSGSAIKGVEWGVLAGLNFPHFSTSGPDFGIDNRLGWQAGLQIGLKFRYFTIGPEVLYVRQSIKLSHADYGTLKIKTNSIDIPLIFSLRALPMLRINVGPVFTVMNDCKYAEGNNEMFFGSMRPTVSYMLGLGLNFGHTLIDFRYNGQFDSKKCYYPTEEAVGFNMRSYSLALSVGFVFMMDSEDKKIDIEGVDPRELYGPQNIYLEQMQELHPNLKIIARGSALTVLGPRSDSERFRKRLDGLIAYYLKYGYISKESVQQAFSTGVIEHDAPVDKDVIVYGNNGTIVRARTVNQLKLVQSYDRNDLLLAIGPAGSGKTYTAIALAVRALKEKHVKRIILTRPAVEAGEKLGFLPGDMKEKLDPYLQPLYDALNDMIPPAKLQKYIEEGTVQIAPLAYMRGRTLDNAFVILDEAQNTTLPQIKMFLTRMGRNAKFIVTGDVTQIDLPRRSDSGLTRAMEILRGVEGIGIVEFDRRDIVRHPLVKQIVEAFDRSAAVEAAPAPETGKMDKNLTALKPALVWKHFAEIAKIPRPSSHEEKIRAYVIGVAKSLGLECKEDAAHNVYVRKPASKGMENRKGIVLQAHLDMVPQKNNDKKFDFTKDPIEAYIDGEWVTANGTTLGADNGIGAAAILAVLEDDTLEHGPLEALFTATEETGMDGAFGLKKGVLHGDILLNLDSEEEGELYVGCAGGVDANITFKYKAEPTPARNYRAVKLVVKGLKGGHSGIQIVEQRANANKLLFRFIREQKKSMDILLCSVDGGGLRNAIPREATATLMVRTKDLEQLTKELKAYEKVVKAEFAGIEDAVSIKLTETEAPETMIAKEVAENLIRAVVGCPNGVQKMSVSMPGLVQTSSNLARVVSDGKTVKLQCLLRSSVNSEKEELGEAISAVFELAGAKVELTGAYNGWKPNLDSPILAAMKASYKALFGKEPAVTAIHAGLECGIIGTNYPKLDMISFGPTICYPHSPDEKVNIASVGKFYEFLVDTLKNAPLKMSLPGGGRRWFVIVNPVAGGGRGLDHFPLISKLLRDAGIQTEPVFTEHKFHATELTVSAVKQGFRRIIAVGGDGTLHEVVNGLFIQQTVDPREVLLAVVAVGAGNDWIRTFGVPNRYQDAIRAIKEGHSFLQDVGVVSYEEAHYRQHRYMANVAGMGFDAMVVKKYAHLKKKGHSNKWLYTWCMIRSFFSYKSTGVKVWIDDRLVYNNLLMSIAIGVCKYNGGGMQQLPEAVADDGLLDVSLIRPVHFWHILFRFRYLFNGGIYRIRHILQERGSRIRIESSPEISVEVDGELLGESPLEFSVLHRAVRIVVSEEFLKRESYPLCSCNIVMHPQRAALLRTLAEIAASCGAAELFLGMRKGEYGFLSAHRLRTMALQCGIVGLPNVGKSTLFNCLSNAKAQAANFPFCTIEPNVGVITVPDERLIRLAEIDNPKRVVPTTIEIVDIAGLVKGASKGEGLGNKFLANIRNTNAIIHVLRCFENDNITHVDGSIDPVRDKGIIDTELQLKDLETIENRLAKTQKQAVVGGDKQAKRAVEILLQYKAVLEQGLSARTVELEKEDRKLVADLNLLTDKPVLYVCNVDEKSAVTGNEHTRAVEAAIADERAEMLIVAAATEADIAELDEYEERQMFLEEIGLKESGVARLIKAAYKLLDLQTFFTTGADESRAWTFRRGMKAPQTAGIIHTDFERGFIRAEVIKYDDYVALGSEKACRDQGKIGVEGKEYVVQDGDIMHFLFNVMKAYWKYLIIGAAIVVSAWLLARAYTYKYHAQETIVVTGLGETEFSSDLIVWNGFITAEAQNVEAGYAQIESSKKKVYDYLLSKGIAAEAVVFQFVNVTKQYEPVYSANGSWAGQRFTGYRLSQGFTVESKSVDAVENVSREISSLIAQGVSIEAMQPDYYYTKLDDVKLSLIEKASADARVRAEKIAVNAGAKLGGVASARMGVFQITGANTNEEFSAGGSFNTSSRQKKARITMRVEYRIKMGNRAKIARALTSRWTERIFFVLLLAAVALRNDAVWRVVSGAFVVWVMCALWAVAPTLCKPARGGAAAQDAAGRKTAESEHDDKKEINKEMERPVRVRFAPSPTGPLHIGGVRTALYNYLFARRHGGTMILRIEDTDSQRFVPGAEEYILESLKWCGIEIDEGVGVGGPHAPYRQSERRDIYLKYAKQLVESGWAYYAFDTAEELDALRKEYEARGETFAYNYSIREKLPTSLSLSKEEVAARIARGDQWVIRFKMPENEIVEMDDLIRGHVEVNTSTLDDKVLYKSADALPTYHLANIVDDRLMEVSHVIRGEEWLPSLPLHYLLYRAFGWTDLQPRFAHLPLLLKPTGGGKLSKRDGDKMGFPVFPLFWKSPTGETARGYREDGYFPEAFINMLALLGWNPGTEQEIFSMQELIDNFSLERVSKSGARFQPDKAKWFNAQYMHHKSDAELAALYQPILREHGIEVSDELAGRAAGIMKERATFITDLWDLTSFFFVAPTQYDEKQAKKYWKGDNPAMLRELREVLAGIDDFSLENTERIVHGWIEQKGYSLGQVMNTLRLALVGAGKGPGMYDVTSFIGKEETLRRIDNLLRNLKPGEMEIEQQIWGATSEGEAVVLYTLRNAAGAEVRLCNVGAAVVSILVPDRDGHLADVALGYKDFRSYFGDPALCGKSIGRVAGCIAYGTMRIDGEEYRLDINGMAGHLNGGVKGFAGRLWESRVETNRVVMSLSSDDGDQGYPGNLQVEAAFDFDEDNALEITYIARTDRTTPVNMACNLLLNLGGEGSGSVLDHELRLDASTVLEADDRLIPTGKLLGVAGTPADFRSLRRLGEGVDSDFDRIRMLRGYDHFFPVDGWRQNILTEVGELRDARSGRRVEILSSQPGVTLYTGNRLGGGCPETKSGGRYRDYEGVAVVCQGYPDAVNRPEFPSPLLAPDGFYCQKTVYRFGTFRMKRIFLLPLTAAAVWCAMPVHADEPVETDSMTPDSMKLYELQQIEVTATRVDRKTPVAYADIGREAISRRNFGSDMPTLLQMTPSVVATSDAGNGIGGTAFRLRGSDASRINVTTNGVPMNDAESHSVYWYDTPDMASSVGTIQVQRGAGTSTNGTGAFGGSVNMTTAPMSSEFSGEASLSYGSYNTNKQSLQIGSGLMGGHWTVDARLSHISSDGYVDRAFTNLESYMLQVGYYDGGTAVKLISFGGVARVGLAYDGVTKEQLETDRRYNSQGLVKHADGSISFYDNQTDNYTQINNQLIVNHRFNARWTLNVTGHYTYGSGYYNQYKNGQTLSEYGIAPIPTDDPNEPITESNLIRRKSMDNHFGGVVASANYTRGRVQLALGGAGNVYDGGHWGNVMSVVDAPGFPRHEYYRNASTKYDANVFAKINWEAARGLNLYADLQYRFIRHNITGTNDNFNSTTSALQELDIHRTYHFFNPKAGVNYTFARNHKVYVSFAVAQKEPTRSNFTDTKNGEYPTSERLYDWEFGYLFHNDRFEAGVNFYYMSYKDQLVATGELSDTGQELSRNIPDSYRRGIELSASLNIARWFSLGANATLSQNRIENYTEYVSEYDADWNYLGEKELYLGTSTLSYSPSVIAGVLLDFHVKGFSALLHTQYVGKQYFTNGRNDALSLDDYCVTNLNLGYELAASKIGSVRFGVQINNLFNTEYCNNGYGYSSIVGGVREDSAFYFPQAMFNVLANVTVRFMELKLILQIVGFTLGLLYLWLEYRANIYLWLVGLVMPVVHGTLYFQTGLYADFGMNVYYFLASVYGWLVWRNAPKTEKGGGISRTPARRWPMIAAAYAAIHLFIYWVLVTFTNSTVPFWDSLTTSLSIVGMWMLSRKYLEQWFVWFVVNLVTVGLYFYKEIPLTALLYTIYLTMSLAGYFRWRRMMRRQMRGMDILELRRYCLSLPLAEECTPFDETTLVFKIGGKMFCYTDMVEFRWIAVKCDPDRAVLLRERYPELVTPAFHSNKRHWNGIRTDGDLPDAFIREQLRHSYLLVAAGITPKALRQEIRNQIEKAGLPEEMRETVCPQIAKNSPMQLDDYFPNRKNYVYLCFGCKTERKTFERTPHPLCCIYPHMEVNKIQEELARLIELVDGWAGSHDVPGIERDLVLDKLKKLYEAIRFANFDEGDSSASASVAAQQSVAEVAPVSEISIDLDDLLAEPVRDFLPESAAMPEALDAPVGESAAVPESAPSVKPVSASAVTEPEPEPVLVVASAPVAEPDPVLADESAPESVPVSESAPAAESIAVAVAVSVTSGLSRQDASMEGQSDKASGTGHDAAVRTGREGLAGSSAGQVVAPSSEADAESKQKVVVSDSLFDLDDLVIRHREKRRVIMSLYETDGPQEAAASKIPVGTGQKPGHAAAPQQQATAGKEQDDAAAPQPETLLEKMDEPKKSVTSQIPEPQSETSESDSVAAEISEQADNAADADASVAASQKTGVAETTSTKTDAPKYPFAAEPEPVLGEVLGGDVHTLADTIAAPKDMASEIVRKERITDLKQAIGINDKFLLLRDLFGGDTERYERTIDRLNEFDDLDDCIIYISENYDWNPSSDGVRFLMELLERKLSMAKLYIVPTPIGNLDDITIRAVRVLSEVDFILAEDTRTSSVLLKHLGIEKKMYAHHKFNEHATVGLVADNIAQGRSAALISDAGTPGISDPGFLLVRACLEAGIEVETLPGATAFVPALVQSGFPCDRFCFEGFLPQKKGRNKHLQSLASEPRTMIFYESPFRVVKTLEQFAEVFGPERMAAVSRELTKKFEQTVRGTLAEVADYFREHTPKGEFVIVVAGLPKPGKNMDTESEEEMENSELKEQPRHSFRLWAEFRAFIRDRFSLEDDKASQDEVAANISKGTEFRGVNLWVLICATMVASLGLNVNSAAVIIGAMCISPIMGPIMGIGFSLGINDFDLLKKSVRNFVLMFVVAISTSTLFFFISPLGNASSELLARTTPTTYDVLIAFFGGMAGIVAQSRQDRNSTVIPGVAIATALMPPLCTAGFGLATGQYRFFFGAFYLFFINTVFIALATYIFTRFLKYRKKTFLNKSRERFVKRTMLAITLVTFIPSVFIGLHMVRVSIFEVQADKYIAQVFNFPQTRVIESSKIYRRGGESPCIELLLVGEPLGEDVIENARGQLASYGLPRTELVVRQASNSDKVDLQSLQSSYVELLDEKNRQIAEMKQRLARYQVTNVDIGDISQEVGVMSDNVKSMSLTKGVMFDVAGKPLDTLLVCVITPKDFQRQIDREQLRKWLSVRTKVDNVKLFVEPKSNEMSKPEVERQKSPNLGFWGRIGLESLWIFCKFFSILPYWFRYYVVEPAVFGALRLLRYRYRVVTENLRNSFPEKSLEELHAIRRGFYRTLAEIFVDTFSLAGLTDEKCRQVVVVKDLEKQMAAVEGRDWIALTAHLGCWEYCSFWGIIVPSQVVVAVYHPLRSRVFDELYKRLRSHANICPVPMAESLRFYLRNREKGIDGKNIVMGLIADQNPPRRPDSHWFRFLNRDTIFFDGGEKLALRCGLPVYCCWLRRVKPGYYEMDFDRIYDGEEEVAPHEITERYVRRLEQKIREYPDLWMWSHKRWKHKSPADLARMECERKQKMILNWNGAGHLRRFLPSVLASVPEGVGVVVADNGSTDDSLGVLEREFPAVGRIVLDRNYGFAGGYNRALEYLDADYFILLNSDVETPAGWVEPLVETLDRDRTVAAVAPKLLSLVEPARFEYAGASGGFIDYLGYPFCRGRILQCVERDEGQYDDARDVFWASGAAFCCRAEVFRALGGFDEDFFAHMEEIDLCWRMQLAGYRVRIEPRSRVYHLGGGSLAQGSPSKVFYNHRNNLAMLYKCASPVQRSVVAIVRPVLDSCAALSYLMQGRPDYVRAVGRAWRDFLRAHKALAAKRRAVRGAVKGKPRGIYCGSIVLRYLLGRRRFGKLLMEKLVVIPTYNERENISKMISKVMSLEGGYHLLVVDDGSPDGTGAIVKERQAEFPDRLFLLERSGKLGLGTAYIEGFRWALARPYDAVFEMDCDFSHNPDDLLRLTAELEAGADVAVGSRYSKGVTVVNWPMSRLLMSYCASRYVRIVTGMPVCDATAGFVGYKREVLAAIDFDRIEMVGYGFQIEMKYTAWKMGFRIGEVPIIFADRTEGTSKMSGGIFGEAFFGVLALPFRTIARKKMVTIREYRTTDKDDVMELIRRNTPEYFAAEEEIDLSDYLDREIELYYVLVTNDRIVGCGGINFADDKTVGKISWDIIHPDYQGKSLGKQLLEYRIDKLKSIDRVRKITVRTSQLVYKFYQKQGFVLKATHKDYWAKGIDWSMKEIRTPLYFKMMAIATNDTNTKEKAANFLEEIIQESIAKGDTRVQTRFPPEPNGYLHIGHAKSICINFGLAKKYGGKCNLRFDDTNPVKEDVEYVDSIKRDIRWLGFDWALERYASDYFDQLYDWAVVLIKKGLAYVDDQTQEEIRLTRGTVSEPGKESPWRNRSVEENLDLFERMKKGEFADGEKVLRAKIDMAHPNMLFRDPIMYRILHAEHHRTGNKWCIYPMYDYAHGQCDSIERITHSICTLEFDVHRPLYDWFIQALDIYPSHQYEFARLNLTYTMMSKRRLLKLVQEGAVMGWDDPRMPTICALRRKGYTPASVRNFAEMVGVAKRDNVIDLGKLEFCVREDLNKVAERRMAVLNPLKVVITNYPEGKTELFTAINNPEDENAGTRQVPFSREIYIERDDFMEVPPKKYYRLSPGTEVRLRYSYLIRCEEVVKDAEGNITELRCTYDPESGNGSSSDGRRVKGVIHWVSAADAIEAEIRLFNPLFTTEDPDDVAEGGSWEDNLNPDSMIVTRGYLEPSLGEAPIGQPFQFERVGYFCADTDSKPGHPVFNRTVTLKDSWAKINKMKQIALILTLLLAAAGASAQEVFIGADFDTRFDNREHSDCNIDDSHTFFSMRLTPKAGVIWSEKNRLVVAVDLLQDFGDKEHKFLSKVDPQIYYQFNSKTAQAVAGIFPRSLLLARYDPFFLGSAYSFYNNRIQGLAAHYKSQTGSFIEFAIDWEGMRSYQTREKFRILSGGEYKGRHWYGGYVMTLLHYAKTDNTELDEGVVDHILLNPYVGYRYEGAYTFDARLGYLQSLQRDRRTEEGWKAPKGGRLTLSVSRWGVCLLNELYVGENMLPFWDIYGTGLYASGPFYATPKKIYNQTAVTYNRRFFNNTVGVSAGFYFHYDGVGLGLQQILKVSVNLQKTVYRPKKMRKITNEELGRPSAGEFARMEKMPVAVVLDNVRSMQNVGAFFRTADAFAVERIALCGITATPPNREIHKTALGAELTVAWDYFAATTDCIAALRAQGYLIYVVEQVEGAVMLDEFRPRPGQKYALVFGNEVDGVAQEVVDAADGAIEIPQAGTKHSVNVSVAGGVVLWNFFWQVRPKRMSVESTVRAVTTYRLWEMKQRREKIAMLTSYDYSMARIVDAAGVDVILVGDSAANVMAGYETTVPITLDMMIYHARSVARAVRRALVVVDLPFGTYQGNSKVALESAVRIMKETEADAVKIEGGEEILESVNRILSAGIPVMGHLGLTPQSIHKFGTYNVRAKDEEEAEKLVRDAHLLEDAGCFAIVLEKIPAALGTRVASELRIPIIGIGAGGGVDGQVLVIHDMLGINKGFSPRFLRRYADLHEVMTGAVTSYVEDVKSGDFPNESEQYMKKKIDATENPSRLENASARALSADRSEQASRPGTFSTMMSDRVIFSSASARIVAAEQVKGNKIAAMKPGADTSLASAANWKTTNGSNLSFGNFHGKSCMKTVGAGSSAGVWLDYFEDAPLCSQGRPMATSVDVFAEAPAQIRLGAADETKSIVELAEYQVGRWIRISTVLTPTGMRNFQIYNNTAGAIVYFRNAKVEFSSSPTLYTPQTQDNIWHADLEFLYGYNNFVKNDQVYFLQKNSASGAATRQYWKLVTAAGEDWIEFSSTDSEGTGEPQPGDWIAQLGNRSDAKRQSALVQEFTSEGKILVVWYEGIDSFSMTDRDRMHIGNGAMDAEVMNVGTINSSTINNKGEVETNTLNVKSRIDAGTIVATGNITTKGTLTASKIEGDFPMDIPDDLEVNTVTASGTVKALNGEFDTVTVKDKNIILNQEGITCKGPALAGNLSANGIVLKKDNTTYIELSTLGNLYTVIRLHNLPQGGPKDSRIQTLPTNHIFINTDEPFAENQFGKFYPLGIKLMKRILLFITATLLLASGTSCSDDNTNFDPIGDELGIPYKDGHDVYGVEVWEETSVILTNYYSLIEEIIQEKTAKIQSIWWLSPAKEKCNVRWNCSAPIMGKTDHSSSYIINPDYNMNSSQITIDLTDVTDNFTVEAIVSIGNLSIRRFQTIPIVTNEIRCDAFYYTFGTPLMQLENNIDNENTLNSDILKATYYARTRPVNFLGFTNLPGQRLEKLYCTATIADPNPLHDLQYACKICLSPEEPEFELQSGSENVYRVLNPQQWEINGLLCTLENTTWQQLGASENTDDTEFACLTIKKLMHLLIDKRHRSEILLPAKVIIIFGLFFVHSPNFQKIGSTARKTSLQQGDRFKITGIKPPRRCRSVLFASGERGFGIQVSPFSKNNSRMKFYYNSIVMSFINEKVQPEGLTFDDVLLVPAYSEVLPREVSVVTRFSRNIQLNIPIVSAAMDTVTEAPLAIALAREGGIGVIHKNMSIAEQAAHVRKVKRAENGMIYDPITISKDDTVGDALALMKENKIGGIPVVAPDQHLIGIVTNRDLRFQRDMNRKIDEVMTKEGLVTTHNSDLQRAADILLRNKIEKLPVVDADGKLVGLITYKDITKVQDHPNACKDAKGRLRVAAGVGITPDVMDRVKALVDEDVDAVVLDTAHGHSVNVKNTLHKIKAVYPDLEVVVGNIATAEAAEFLISNGADGVKVGIGPGSICTTRVIAGVGVPQLSAIYGAASVARKYGIPVIADGGLRYSGDIVKALAAGGDCVMIGSMFAGTEEAPGETIIYNGRKFKSYRGMGSLDAMKAGSADRYFQKGDVNINKLVPEGIVARVPFKGMLSETVFQLVGGIRAGMGYCGARDIEALKQAQFIRITSSGMQESHPHDVAITSEAPNYSSERMPNIRRNRLRTTRYDWAAVFVVLTLLAIWWFTGCRHAWMRHLVLASALFYFFVVRIAVNLYRMKKDNSENASEENKNQIEMQEKIVILDFGSQYTQLIARRVRELNVYCEIHPFNKIPELDASVRGVILSGSPFSVRDENAPKPDLTAIKGRLPLLGVCYGAQYLAHFYGGEVQSAPSREYGRAMLTVVEPSDPLMQGVPSPTQVWMSHGDTITSVPDTYRVIASTEDVRYAAFRIEGERSWGIQFHPEVYHSTDGITLLRNFVVGICGCKQNWTPESFVETTVRELREKLGDDRVVLGLSGGVDSSVAAVLLHRAIGKNLYCIFVDSGLLRKNEFDSVLESYKGMGLNVKGVKAHDRFLGDLAGVTDPEKKRKIIGRDFVEVFNAEAKQIENVKWLAQGTIYPDVVESASASVKGPAAMIKSHHNVGGLPEEMHLKIVEPLRLLFKDEVRRVGKSLGIDPQLLGRHPFPGPGLAIRILGDITPEKVEILQNVDKIYIDALREWGLYDQVWQAGAILLPVKSVGVMGDERTYESCVALRAVASTDGMTADWVHLPYDFLAAVSNDIINKVRGVNRVVYDISSKPPATIEWEMPIFTPPSPALQKAWWKETIVYQIYPRSFKDSNDDGIGDLNGITEKLDYLHGLGIETLWLNPIFASPNADNGYDISDYRQIMPDFGTMEDFDRLLKETHARGMRLLLDLVLNHTSDQHPWFCEARTSRENPYYDYYLWWPEEQGHPPYRKSHFDEKGDAWCYNAPTRSYYLHYFARQQPDLNWQSPKVRAEIYDILRFWLDKGVDGFRLDSIPYIAKDTSFPEIDLRKYPDVFPYYSLGPHLHDYLHEMNREVFSRYDCTTVGEGSKTAPEEGWKFIAPERQELDMLYHFGAADIRNETEADDPATGIPYSLLALKRMYAEWDAAVGDGWPTIYLGNHDQPRMVSRFGSDAPEWRDLSAKMLTMFLLTMRGTPYWLAGDELGMTNIRFTRIEEYDDIDTRNHYRKLLREGGDTEQFLREQQEIGRDNARTPYQWDGTLYAGFSTAKPWLRVNPNHTEVNAARELCDPDSVLNFFRRAVTLRKGHPDLVYGSFRPVDADNPQVFAYLREGTGRNYLTVLNFSPKAARFDPKTDLTEAMPLLHNYPAPPIAEKEGPIELRPYEGILYRLAMKNSKVYDRPIKPFPEYVQKDITYKLHTLLLALLRPTITPSILQPNILNLSEEDWTRLFTLAAQHGVTALLFDTILRLPEQQQPSRALKIRWALSSEAIEKRHAQQTRAAHELTTLFASHGVRTILLKGLGLSIYYPRPEHRECGDIDLWLDDCDKGNRLIEELGIKINYDSEKHAVFHYKGVMVENHSHLLMPSHRRTERAIDDFLVGEAENSRLAPAGYYTPSPMFNALYLLRHMARHFGTEGINLRHLLDWGLFLRSEQSEIDFEKILTLYAATGYDTVYNIFTALAGELLDEDFTPLLSAVPDPQLKQRVLNDILGFGVYRTPSGNRLTRIGRKTRKLFSCRWKYRTLLPENFWRDVILPSLLFHLKNPKNIMKQRIHLSLARMSGCEQQFIQEAFDTNWVVPLGPNVNAFEKDLETFIGQGRHIVALSSGTAAIHLGLLQLGIGPGDEVICQSFTFSASANPITYLGGTPVFVDSEEETWNMSPQFLEQAIHDRKAKTGKYPKAIIPVHLYGMPAKLDEICAIAEKYNIPICEDAAEAIGSEYKGQKCGTFGEFGALSFNGNKMITTSGGGALICRTEEEAKRTIFYATQAREDRPYYYHKHIGYNYRLSNICAGIGRGQMTVLEQYIARRRAIHTLYSENFADTEGIHVKQNPSSEYDSNFWLTCIEVDAKKCNNKTANDIRIHLEQENIESRLLWRPMHMQPIFSRNAYYGNKIAETIFERGLCLPSGPSLTDEQILEVVSSIKKFIRMDAKWIFDRTASFLGLICLCPILLIIAILIKIKMPGGPVIFQQVRVGKEGKLFTMYKFRSMQVIHSGSSISIAGESRITPLGAVLRKYKLDELPELWNVLIGDMSFVGPRPDVPGYADQLTGENKLILKLRPGITGPASLKYANEEELLAQVPDPVKYNNEIIFPDKVQINLDYYYTHTFRGDLKLIFQTIFHTYPTPEIQKMNYPVAVIIPVYKNDTPQYVRPAIDSIIKQTYSCRIYIGVDGPIGNSLNSCLEAYENNKNVSIVRFAENRGLACVLNDLLQICFDNGYEYIARMDADDISLPDRIEKQICFLNEHPEIDVVGGAINEIDEEGCESGKTIVYPATPTECKKFFAKRNPLAHPAVLFRKSFFDKIGHCYRPEYRKNQDTMLWYDGLMHGVNIANLPNVVLKFRMTEALFKKRRNGWVFAKKQLADRLQINKNLHYGHTADLFAYAMFCLLIAPAWVKKIAYKIFRMKIVFVTDTLSSGGSERVLSTLANSLCKTYEVSIVCLRKRMIAYDINPAIKLAFADDHHRDITAKLLWLRKYLRQYDLVIAFMLPVFVATLACMLFTRTPIIVSERNDPGKASLFRKIIRRMLLFRMQHMVVQTPEIKKYFPAKYHKRISVIANPISEQFEWQSALSSHKEKKIISVGRLDPQKNQKMMIDAFALFSKTHPDHCLDIYGEGPMRQELEEYIERKGCRVRLQGRSANIASQMKSAQVFVLSSDYEGMSNAMIEAMYLGLPVISTKVSGAKELIIDHINGCFADDANSIAQAFSYLSENETAAREIGLRASNTIKHLVDKNTVLQQWMDIIEKYTKLMKIVFFTSGLSGGGAERVCCNLANFLCQREHDIEFITISDDEATYPLSTKISRQALLHQQERSNFLHDNLLRFYRVCKLIRKTRCDCYIVMLPIPTILLLSLRFLTKAKIIASERVDPSTYPPSKQKRLKKVAHKADGWVFQTEIQKNWYGNSIGSAAVKIIPNAINKEFITAEYSGPRNKQIVSSGRLTEQKNHALLIKAFAGITAKYPAYKLVIYGDGPLRKDLELLASNLGIADKVSFPGYTTEIRKKIERSSLFVLSSDFEGMPNALMEAMALGVPCISTDCKGGGARFLIKNGTNGLLTPIGDVEALQTAMEKILSDQFFADNLSHNAHKLCETHSPEKIYAEWENLIKKVVCLQPSDKKMGTVHTIENHLTAISRTIRRVLVSYSERQNIQKKRKLIDKVSLTETQKQEIKEFFRKNYGKSLSTAWHRLYQSYTGIYCKDYFPEILFSTRLEPKLNPYREAEILGDKSFLPLLFSGIEGLHIPQTYLSCVKGIYRNGNNALLSPAEAYMSLFDRGKCVVKKTIDTSSGRDVQICNFVGGQDIGSSLAVREVLEKFGNNFVVQELIHQADVLATLNPSSVNTFRVITYILDDRIHICPIALRLGRSSSDRDNIHYGGVCIGINADGTLKKEAFSEQGEHFVFHPDTKVKFSGYNIGGGNLTRIKETVLKMHANLPYLGILSWDLSLDTEGAVVLIEVNTTGQSAWFCQMVNGESLFGENTGKMLQLIRKMSHSITDIIKNPALLLLTLGHREYFNWVSDKSYLKIAFWARMHKKLDLEHPKSFSEKLQWLKLYDRNPRYTQLCDKYEVKAIVGDIIGHEYLIPTLGVWEKFEDIDFSKLPERFVLKCTHDSGGVIVCKDKSKLNYKKVHRKINACLRHNFFWGMREWPYKDIKPRIIAEQYMEDNASGELRDYKFFCFDGKVKALFIASDRMTQGEETKFDFFDADYNHLPFRNGHPNASVLPNKPLNFDKMKELAAQLSAGYPQVRVDLYEVNGKVYFGELTFFHWSGMTPFEPEDWDYKFGEWLTLPPKTRMYHQDPIPSEKARFEYLHSFYSKINRGISRPSLLVHKLLNFLYGCNLLSDKLFLSLKFRLKMGGGINWKSPHTFNEKLQWLKLYNRRPEYTIMADKIEAKKWVAERIGEKYIIPTLGVWTKAEEVDFDTLPDKFVIKCNHNSGTGMYICKDKQQMDVQKVRNGLRTGLQEDYFHHNGEWPYKNIKPRIIAEQYIEDKKSHELYDYKFFCFNGKVKLFKIDFDRFTEHHANYYTPTGEILPLVETAYPPQFDRIISMPSTLPQMISLAETLSCGIPFLRVDFYTIGMDIFFGELTFFPTSGMTPFEPKDWDKKLGDMLILPTKNKMNVLIAGDFCDRYRISDLIARGNYASLFDDIKYLTEQADVSIINFEFPIVLHAGVPITKSGPTLQGQPAAVDAVKYAGFNVCTLANNHILDQGTKCCIETRELLENAGIKTVGIGKNSAEAATVLYINQKEKGTLAIVNCCEHEFSIATATTAGANPLNPIQQYYNIQEARTKADYVLVIVHGGHEHYALPSPRMKETYRFFIDAGADAIINHHQHCYSGYEIYHGKPIFYGLGNLLFDHKSERHGPWNEGFMVSLRLDKQTLPQFELYPYTQCNERPSVIPMNEAERKIFAERIDKLNQIISNEDQLNTTFETWAQKTSRNFLVPFQPYCTRTAKRLFVHGLLPSFITRKKRYQILNYPNCEAHLDKLRTVVSKLKMEHKGFWYIAMLIPLYFLTPFYARIIDKTKYQTLLTVTLCIILLLISTIKIENNNLFSHVWNNTAFVLQRIPSYLIGYYMAPSILKGKKVNLLKLTGIIAGCFLVIKIIFPANTFWEWLEIYPIMLVSYFFIKKSVWIKRICTFMGQISLESYLTNGCMILLIGLLPWETTLDHLNYGNYLRYTLIIVTGITTAYCANRIINKITARLMCLYLFAYHRITPPXXXXXXXXXXXXXXXXXXXXXXXXXXXXXXXXXXXXXXXXXXXXXXXXPRLPVIMIHRSMSFGQCMAGGNKEWHNRMSTVATPINSLRYMLSIVAVHYVWHGGSAASGSNIAAAYFLGNFAQIGVACFVLIGAWFLIDKEFSITRIFNLSKQITFYSLSIALLLFIIGMASYTDIIKNAMPIIFKRYWFLTPYVFLLFLHPFLNYVLNACSKKQIRFLCISLFIAVSVIPTIFIVTDPFGFNIFRFILLYLIAYAIKKECIRIEFKNNLLNFITSITVAFGMYSLSLLALRWNYTDFASLYPKQMSSVPVMISSVYLFLGIKHLTFKSNFINKLSAHTLAVYLISEHTCLFKWFWTDILRTDKLWNAGIFEYLGYSSLIILSVFVSCILIDYIIKNTIYKILPNTPKFLINIEHYFKIKTMKHVGNLQYITFLKGLAILGVILVHAPQLIKEINPLIREFLHAGAFGCQLFFVISGFLAVKSWERLLAKYENSTEKNRTTYKTFLKKRYLSIAPIYILFILFYQIISYYIATFNVEPFYKISHNPLSILANIFLLNGLDYQAFNNIVPGGWFIGTIFLFYLLFPLIYKLYRYIKTYNPRLLFLLPLGGVIVSAIFQTGIFFIIGDWTLSKPGSFTYYSIINQLPCMLIGVTLNYYLKNTKLSKNNLLLCFICLGLIGNLLWYALRLHYWIYALIPSIIGWSFFYLFLYVQRKSEEIRGGETVNNQTRNYITKKIEQIGKVSFSVYFTNFIGTFIFPWGIQLLLVHYGYTINGTLLFFLLLIPIFLITFLFVPPVDYIISRIKSLLMEGAYLFLLIIILSGYLFTKNIGINILQCVIVCALFGGSQDPLDFYNYEDIYNTVKQGYDVSYEIGYVWLNDICGKLGCSYIEFRYIAGILFCSALSIIIRKLTVHPNAVWSSYLIFSAMFDACLLRNSMALIIAIIAILLLVRARSTKEYLFSAGLIALAALFHSAYWVLLFFIPLWILINRKNGIKLVLLIIVIIYMVSIFSDNLLFRIYSHFLIREATIDKYMTGHYANMTGALYNTVKYLFIIFPVLYYYSRHSNNQEISSPKQKSLRSVFNHKILKLNIIFSLVLVPQFFAVNFSRLFFILIIFNYIYIANQIGVSRKIIKPRLFSIAYASSLLLLMLLWESETTLDDVFFMHFETNKLLNLFMKILVTGANGYIGLHIVKTLLDKGIQVIACDLNTDEVDKRAERKNIDLFTLPDTNIYTLLGTPDVCLHLAWRNGFVHNASTHLGDLSAHYRFLTRIIDDGLPQLAVMGTMHEIGYWEGAIDENTPCNPLSMYGIAKDALRRCMMQYAQQKGCILQWLRGYYILGDDKKNNSIFCKLLLADEEGRETFPFTTGKNKYDFITVDKLAEIISAVIMQREVTGIINCCTGQPISLAERVEQFIQEHGLKIKLEYGAFPDRPYDSPCIYGNPSKINQILNNLNRMQKNGIGFTQRACEAVCLGKKLLTNNPHIKNEPFFNLEYISTFTSPNDIDSDFLKKIKDPIDINYHYKEKMSPIELLNFIENYLMSELTPADMEMIYCCEVNDFSTDTLYPVIVFTSAPTLEKEHTLTLRWTTVEGDVKTASVTCTPEVDPALQMAGCTADPGAEPGPFGENPPTAENPHAVPVEQALEELQSVLEEIDTPAEDGAVTRSEATADVEDLLYIVNFENEAGYAILGADDRLEPVYAVVDEGSLTTEDFRYAVTVTPEQAEADGELVFPLQMVAQAAIIGIENADIDADGGVAPMSDDGRHTGDLGGNVLREEYTPFVVQERIGPLIPVKWGQGAPYNVCCPLVHGQSPVAGCGAIAAAQVMVSNYWNYGYAPKSIGKTAIDWTLIRRTILSPKLVSSGINGMPSPEGYAVAMLIAAVGIDIDTEYGLEESMAYAYDLQGFLIRMPSKNVTYETYKNSCVRNMLHDQQKATIMRGVHIENGEKKAHFWNLDGWLYRTRYIKTYYRNGTVSQRGPFGQTLVHCNFGWEGVADGYYYDGIFDLSKGPVMPEDSDAGTPASRYYKDLSIFTYTLVLMFYLIANKIVFYLVINKEMFNFGSGGKLLPALFREFSELSEQGSTENPEINPLMATIQTLYLGDLRTEITHVQSGNRVITDAPTDNNGKGEYISPTDMVAAALGSCMLTLMGIAARRLEIDLKGTRVEIQKVMAAEPRRIAEIRLDFYLPGDYSDKDKKILQGAAETCPVGKSLHPDIRQAVTWHYGSAKMADLSSGLSEKRWFYKMRLGLARPTDDRSGCRRLSWISPRKEEKCMLEKLAKQTAIYGISTIVVRFLNYLLTPYFTRVFDPGIYGITVDVYALIPFALVILTMGMESGYFRFAAKADEAGGDVTAAKRRLFATTWGITSLAALLFFGLVTLFRTTVSEWMGADYAANPDFVVWVAAIIFLDVCTAIPFARLREQGRALTYVGFKAFSVVITVVLAVAFGLAGFYETSFGVGWVFVGNLIASLLTLLAILTTTNRTLPRIDGKLLRRVLVYSLPLMVSGIAGTANEFIYPQMIKYLVPEGAMGEVGIYGAIVKIGMVLMLFVQMYRLAAEPFFLADYKKSDFLQMNAAALKYYVLVSMFIFLGIAFFRDLFGLIVGKDFREGIGILPVVLGANVLNGVWLNLSFWYKREERTSLAIVVTFVGLIFTIGCSLSFIPRWGYYGAAWARLVSEAAMVAVSFWLNRRFYPMPYQTGRILGYVALALVLYGVSVVVDDHVAPAVPRYACYAALLLLYFYYAVRREKIDLRALVRSAMHRGINNNERMSEKLIILLLSGTLLMTGVMALSWEPGRDRTLTLGLVLVAMLCIAVRQRLRRMQRNREMRFSEVIGQRELKRHLVRGVDAGRVSHAQLFTGRPGAGALPLALAYVQYLNCTNRRDGDSCGECPNCRQIAGLAHPDLHFVFPVNKQGKKSGEAVLSDDFMPLWRQVVSERNGYFSPQEWYDRLDLGRTLKGAISAREADGIIRKLSFKSFAAEYKCVIVWLPETMNEEAANKILKILEEPWEKTLFVLVSERPDLLLPTILSRTQEVVVPRLTDEEVRAELERRGERDPEKIRTFTRLAAGDLIELEHLLRGEGNELRKDDFEFFCSLMRLSYNDKHLELMAWAEEVAQLSREQQRAFLTDAVRLLRESYLLHAGLGEISCLWGEEAKFCRNFAPFIGNQNIESLVAEAESAMAQIRQNGNPTIVFTHFALSVSKMIKKLMARAIILTGGNVGDVKTRLQNAQRLINQHAGPVMRCSHRYKSRAWGFDAEEEFSNQVLEVDTDLTPEQLLDALQAIERELGRDREAEQSLKQRTGARYTSRPIDIDILFYDDRVIRTERLTVPHPLIQEREFVLVPLCEWMRDYRHPVLGKTVGELLEELKNRNETHEKAMKKHKFKILTFVAVAAALAGTGCFKSIGYETFYVLRPWAQEGTVKTPIPREDMLAYAFDADTTEWSVLSYEDAVAGIITSRRTGEKLRPIAQGEPYEIDGNENWLAMQLNGPRFLILAVDQSNRLYGFTEQAIGENLPQMHVSVTFYPKEKGKRFLKGKWIMCNDFYTEPEPEPDPDPENPDTPDNPDNPNNPGTEDPNPDDPGTPDDPDTPDTPAPDDPDTPENPDTPENPDVPDNPNPDTPDEPAVSGARSSLFRMKRQNHKAIVWLRVCVLAMFCPAFLWRCATVMNLEGGPIDTLPPVIVSMLPDNFTTNFTARKIYVTFDEFVQLKDQQKEFFTSPQMKKKPQLSIRGRGILIQIKDTLKENTTYALNFGSAVRDNNEGNPLYSMRYVFSTGPEVDSMVVSGYTADSYTADSVAKSFICFFPADSVEDVPEYDSTMFKYQPAVIARAETNGIFIAQNLKPIPYRVYAFEDKNNNQIYEPSVDQVGFLTGTYNPAELPDFGIWYDSIRRYVTADPQLYFRMFTDEAFGRQYLRESERPVQHKALLYFNAGHPRIDSIVFDSIPADRVIIEPQSRNRDTIALWFDVPSASLPDTIRGEITYMKHDSLDRLLPSTEKLKLAWRYIESKEEAKEREQLEKEKEKTLAAGEEWVEPEKPSTFTYKFSTTGSVTPETKLYVEFDYPLVRFDSAAVVLTEQMEKEEPRPIRIRWQQDTANMRRWWLDVPWQLKNNYALTIPKGALADVAEQQNDSIAVNYTGVDPEKFATFIVNVVGKSDEASYIVQLLNESGKLLQEKTGVHSGVCRFNYVPAGNVKFRIIEDMNDNGRWDTGNLVERRQPERAEYYMDDKNIDTFAAKENWEVELTIDMNKVFAPVTMQSLAELLEKREALRLQKVLEERAKNPRRNTNSNTSNTTSTMGGGFNSGMNTMMNGLRMMRRLGMICLFLGAVLCGGTAAAQHTLGVTGGYGYGNARFYPDQETRAVWGCYTAGVTWRYYGPQRFVGGFGIDFEYLQRGFSFLQNPTEEDPAKYQWYTRRVKSLMLPIVWQPHIYLFKNRMRVYLDAAVFFSYNISSTFINEQGSTVSPEQSKGPWRGEYDFKVVRDNRWGYGLAGGGGVAVLVKQLEFSVRVRYYFGYSDLLRNHNKYAGNTTDGYENPFYTTPQRSPLDNLTFSIGVSYRFNKSGFTEWNNRPPKRDKNKEVFNYKGVTKMETTRQQKIAKQIQRDMAEIFQKEGAEIVRGVLVTVTAVRVSPDFSYAKIYVSVFPFEQNAAVMATLEQHNWFLRRALGQRIRNQLKTVPEIQFFLDDSLEYIEQIDRAMHREEMLTRFFARRYLFSPKSRSVINVIAGVSVLSFAMPVAAMIVLLSVLNGFGDFAKSMSSAFDADLTVAPREGQTFASAEIDSLALTRVKGVGVVSYLLEQQVLLERDGLQTMATLRGVDDRYTEVFPIEETIPLGSWSVRTGDLDRLVLGRDMARTLGIRSLVRAEVAVYALRRGSFSSLLPVDGYSVRRLDVGGLFFLDLESENEYALTSLRAAQELFDRPGRISAISVRVADGADAEKVRREIAGIVGDDFTVRTRDEMNALFFRLVAYEKWGVFFISLLVLVLASFSVVGTLVMLMIEKRDDVATLRALGADTKLIRSIFVGEGLLIGGLGASIGAVLGVGFCLAQQHFGMIRIPVDTLLLYSYPVEMRWSDLLIVAAAFGAVILAISELTVRSVMKNNKLMKRLIRLFCLIAAATALGSCARDKVIPDEELARIFRDAYLINAYVSDRGVKLDSLELYEPVFSRYGYTAEDVRYTIGNFSRRKSAKLSDVVEQSIRLLEEESAYYKYEVGVLDTIDNVARRRFTRTVYSDSLIRVTRIKDTARLRVRIPDTRPGEYRVSFDYLIDSLDENLAPRMRVWLVEADSSRKGESSSILRKSSRERVSRILQADSSARSLVLSLYGTREKFRRPDVTIYDLKVSYTPETAEAVDSLYIDQLGLKIFADEFFSVFSPDSLQLPLHGEASRMTVRADGRIESVETCAAPDGRPGVEFYAGVLVPGLINVHCHLELSYLRGAIAQDGGFAAFARSMGRVRGQFSEQERAAAIAAADARMWAEGMQAVGDVANGDSAFAVKARSRLSYRTFAEVFGLHTDSTDEQRRLLRYPETSLTPHSIYSVQDALFREICAEGDEPLSIHFMETPAEAELFEQRGELWEWYRKAGFTCDFLHYGSPARRIVESVPADRSVILIHNCCVNQQDIDLIMNHFTAPVWWCLCPGSNRYISRLVPPVELLRRNGLNICLGTDSLASNTALSLLGEMQHLGKIPLAELLTWAAPNGARALGFSELGEVAAGKRPGLAVLSGLDYDSMTLTPASCIARILMAETLKKWEEISRSYRVYIKLEKRLSENTVESYMRDLRQFAHFILRFYDVPPRKVEAPMIERYLALLYDQGREKTSQARALSGIRSFYNYLMLTDVIDSTPTQFIDTPKFGRHLPDILTVEEIDRIVAAVDTSTVKGRRDSAMLEVLYSCGLRVSELTSLRLGDLFFGEGYIRVTGKGDKQRLVPVSGAAREKIQRYLDDRATKTSASDVVFLNNRGTQLTRVMVFTILREAVHRAGIDKHISPHTFRHSFATHLLEGGASIRQVQEMLGHESILTTEIYTHLEGDHLRDTVEKYLPLMLRASVVRACPSCVLSLKAEKKTGACSQFSEAYPIFYKDKMDYVELNVRVTDPELAEILTAELAELPYESFQTEGEVLKAYIPRERLADCMQQTDDLLARYGIADRRYIAIESQNWNALWEQNFTPVDVDGRILIRAPFHASQPGYELEVVVMPRMAFGSGHHATTCLVASALCDLSLTGKRGLDMGCGTGVLAIVAAKRGAATVDAVDIDEWAEANCRENAAANGLAERIAPMLGDVSRIAGRKYDFIAANINRNILTMDMPAYAEALDTGGDLLMSGFLEEDVPVIEARARARACGLEPVEVRRRDGWAMVHVKKAMPGTLKTYKARGIVLNSLKYGDSAMVVHLLTDALGRQSYMVQGVRSSRGRGSKLALFQPMFALEFEGLTSSRQQMHRFREVQSGIVLQRMPFDVRRSTIALFMAEVLYRLVKESEPDSQLFDFVWESIGALDSMEEGVANFHLWFLVNLSRFLGFYPGNEYMPGAWFDACEGSYTVQKPPHATVMTPENARLMNDFVECDVRCLAEIGLNRTQRSAFLEALLAYYGYHLDAIHAVQSVRILQEVFMKRIFYSLLFAGTVWTAASQNPPEIKTPDRKAAERIEEYYLSKMLPDSMMTPVISMSSLMEIRTKYALRRIDIVPYKVRSGWFSISNGQAQNWSPYLDGHLDARTLSFPVPRMRLVIEDDRTDFQTDIPFPGANLLREIFVSNSRIRKFGYLCVTDSGKKIASLHTCMKKSLIRQLKSEDWVIVGAGAAILLLALLFPRWMPAMPKDLSSAGNWMSAGAMFLFLLVLTGVCQRILGRPLRRFAVSLLAIFGVALLSQAVASIPAIKRLGFEAVFFSVIFGLVISNFFRVPEWLKPAIQSEFYIKIGIVCLGATILFGEVLQSGVYALIQAFIVVFTVWYFAFWLARRMRVDEETSTMLASSVSICGVSAAIATCGVIRGDNKKLSYIISLVLVCAVPMMYVMPWLAGLLLPTVVANPETVQEVAGAWMGGTIDTTGAVVASGALLGETAEQTAIIVKSSQNVLLGIAAFVISLYWSYKGQKKRQRPSVRVIWERFPKFVVGFVAVSLLFSLFFAGNEAAPARTSAKMFSNTLFNIAFVCIGLETRFRDIFSKENRRTFWAFMTAQMFNIVVTLIVAYLLFGVLKPYLNMFLPTTLKEVRARGWDQLDVILFTGDAYIDHPSFGAAVVGRLLEAEGYRVAIVPQPNWRDDLRDFTKLGTPRLFFGVTAGAMDSMVNHYTANIRLRSNDAYTPGGKAGFRPDYAVKTYTQILKRLFPRTPVVIGGIEASLRRLTHYDYWSDSLHPSILADSGADLLIYGMGERVIQQVARAMNNGFNAKLLRNIRQVGFMADRSYVERLDPTRTIRLHSYEECVADKRAFGKNFTRIETLSNLMEPDETLVEGVGDRYAVITPPNATLTTEELDHSFELPYERAPHPRYRGRGDIPAWEMIKHSVNIHRGCFGGCSFCTISAHQGKFITSRSEKSILREVERVTRMPDFRGYLSDIGAPSANMYRMGGRDRELCSKCRRPSCLHPKMCPNLDNDHRPLLDLYAKVRAVKGVKKAFIGSGIRYDLFDGSDYLDTVIRHHTSGRLKVAPEHTEDAVLKLMRKPPFVMFERLNADFNRICRREGLPYQLIPYFISSHPGCTERDMRSLADKVLGKLHFDLEQVQDLTPTPMTFSSVMFYTGENPYTGEKVYVARSQEEKRRQKSYFFRRKRMSESQYIPDPDELEDDAAGEQDELYEHYSITADRGQSPLRLDKFLTIHMERCSRNRIQTAADAGNILVNGKPAKSSYKVKPGDRISLVMPYPKREIEIIPENIPLEIPYEDDDLLLVNKPAGMVVHPGHGNYSATLVNALTYHLQNLPLFQEGDMRAGLVHRIDKNTSGLLVIAKNERAHARLAKQFFDHTITRRYVALVWGNFEEDEGTITGNIGRSPKDRQKMWVFEDGSDGKHAVTHYRVLKRYGYVTLIECRLETGRTHQIRVHMQWKGHPLFGDERYGGDRILKGTTFNKYKQFIENCFAAMPRQALHAKSLGFQHPTTGEQVYFESELPEDFRTVLAKWDAYAAAGLAEEMLEQLKKYWAKVSEHPFLKHLFIIVCVLLVLGVTTHLLLLLGTRHSAHRTVPDLTGIPLEEALGEARRQGLEIIVNDSLYVPAYDGGVVLDQLPEKGVGVKPGRTVYVTINSYRQKMVTVPYVAGRSLRQAKNMLEVAGLGIEQIVYRPDLATNYVLEEYADGKRISEKSRVQLEAGSGVTLYVGESGSVSTLVPKTVGLHLQQAKSRLWELGLNIGKISFDEGINLLNQREARVYLQTPSAGSRARLGAKVDLKLTLDAAKVTAQSAAADKEMIKAAEELRRLDAETADSLARVRLDSLANRPVEAEPVIDDGLFPDEETAEDEFFQMSPQLEDIVRKVRSDERIAPAEALVLWHEAPLWLLGELAARSKERVSGDKVYFNRNFHIEPTNLCVFNCNFCSYRRPKGSPEAWDYSLEEVERIARDHAGQGVTEVHIVGGVHPEHDLYYYVEMIRRVKAILPEATVKAFTAIELSYMIRKAGLTIDEGLRLLRSAGMEAIPGGGAEIFDEELRARICPDKGSTAEWFEVHAAAHRLGIPTNATILYGHIECVEHRIDHLDRLRSQQDLTGGFNAFIPLKYRNFGNRMSEIGEVSVTEDLRMLAMSRIYLDNIPHIKAYWVMYGKATTELALAFGADDIDGTIDDTTKIYSMAGADDQRPAMTTEEMRRIVAAAGYRAVERDTFYREIGMKRKLPHFRFPGFKILDRYILGKFLSTYFFAIAMIIVVVVIFDYVEKIDNFTETKAPLKAIIFDYYLNFIPFFINQFSGLFTFIAVIFFTSKMAYQTEIVAMLSGGMSFRRLMWPYFLGALIIASLSLGLNLWLIPVSQRSCVAFENQYIPRKARFQYDKNIYRQIEPGTFAYIRNYSKESNQASFFSLEEYESGAMTASLEAAEVRFNPETKRWSARRYTTRTFDSLGVETFTQHRNLDTLINLDVNELGRTDQLIKTMNIVELNQFLEQQRSKGSDSINIIQVEQHARYAYPVGTFILTLIGVSLSSRKVRGGTGLHIGIGIALCFSYILFIRFFEEFAKSGTLPPWIAVWIPNILYLCIAVYLYRKAPKMKFTLQHKDPSSQARAGELQTDHGVVKTPIFMPVGTAATVKGIFHRDVRDEARAQIILANTYHLYLRPGMDILERAGGVHRFSTWDGPMLTDSGGFQVFSLAGCRKLKEEGCHFQSHIDGSRHLFTPESVIDTERTIGADIMMAFDECPPGDSPRDYAAKSLALTERWLDRCFNRYRQTSPKYGHYQALFPIVQGCTYPDLRARAAENVKQYDADGYAIGGLAVGEPTDVMYEMIEVVNAILPEDRPRYLMGVGTPINILEGIARGVDMFDCVMPTRNGRNGQIFTSEGTINIRNKKWEDDFSPIDPEGTAFVDHVYTKAYLHHLTICQEMLGAQIASLHNIAFYLRLVTEARRHIGAGDFTPWKEQMVAKLGRRLMCIAVMSRPVGAAGGKDGEKSARNNGAGNIRRRLSRASFTATCATKPECGLFYLIANKNCNLFGNMKHFRLFSLFFGCWLLASCTADPGTEPGPFGENPPTAEKPHAVPVEQALEELQSVLEEIDIPAEDGAVTRSGGIRRVKNVTTVSPEVLNPDGTRSEATADVEDLLYIVNFENEAGYAILGADDRLEPVYAVVDEGSLTTEEFRYAVTITDEQAQADGKFVFPLQLVAQAAIIGIENADTDADGGVAPMSDDGRHTGDLGGDVLRREYVYVTQEKVGPLIPVKWGQGYPFNASVTQINGKCCWAGCSAIAVAQVLVSNYWHYGSVVGSIKGTPIDWTLIRRAIQNPNLLIATEGKPSTLTPEAKAVSMLIYAIGVVLNMDYGLDGSSASLKDSRDGLTYVLYKGVNDHTYRDSYVRTMMLDRKKTTIVRGHSSTGRKLNHQWNIDGWLYRMRYIKTYYRNGTTSISSKEQVPQTLIHCNFGWNGLCNGYYFSGSFNTTTKPVDQESGIDNVEGTQDGNYTDDLRMITYTEIPMKRIKYLGVLLSIVTLCVACEKSEKDGLGGFHKNFVELYVDGQIMLTEFQNECSGDAHRLSKKQIAGFVICIPSPKMYFFYGPDIEKFNRWAARNNDIDFNQVLANGALPMVATFADNFSKMVVTSNADWDEAHPAGTSLDDVLQVRINSSSDFVHDGYDMGEYKYEFLQNYDYLKTIEKRPSELTAADMKMVYYSLTDFSSQTKSPVIVFTSAPTLEKEHTLTLRWTTVEGDVKTASVTCTPEVDPALQMKENIIQAIVAKMQRDLDCRQMARLKAVLTSELHNVEIIEKSDCATQQTQENEHLLNSFISAKKIEGCSDKTLTYYRNTIERLLVTLSLAICHITTTDIRTYLSDYQEEHQSSKVTIDNMRRIFSSFFAWLEDEDYIAKSPVRRIHKVKTDSLVKEVLSDEQLEQLRDSCTTKRDLAIIDFLSSTGIRVGELVKLSREDIDFHERQCVVFGKGNKERVVYFNARTKLHLQQYLNERTDSNPALFVSLNSPHSRLTISGVEVRIRKMGQALSMPKVHPHKFRRTLATMAIDKGMPIEQVQRLLGHVRIDTTLHYAIVNQNNVKLAHKKYLGMDLQRINKHKQSFDDICHYIEDDNGADKVEVWFARELQIILGYARWENFQVALTRAVESCKTQNINIDDHFREVTKMVTLGSGAKREIQDFMLTRYACYLVAQNGDPKKEEIAFAQGYFAVQTRRAELIAEHIEQLSRLETRDRLRSSEKQLSRNIYERGVDDKGFGRIRSKGDGVLFGGHTTEDMKNRLGIKSTRPLADFLPTLTIAAKNLATEMTNYNVEQKDLYGEHSITTEHMDNNRSIRQMLGQRGIRPEELPAAEDIKKVERRVASNEKKIEKSSSKLPKLKPEDNEMEIFYTGCFAFEIKKRPKIIDKLKIVVDIEGIPTFLYSKGSTKIGAYNSPGMVKQLLMDAAFAAIPIEDISESIQNNIVAILQGLERKIAINRQINQNLXXXXXXXXXXXXXXXXXXXXXXXXXXXXXXXXXXXXXXXXXXXXXXXXXXPYNLYLSVNTTYKLFLHTSLSMSNEIQFLLYNLPDKEGRVQVVIKDETIWCTQKAMAELFGIDKSGISRHIANIFREEELQQDTTVAKIATVVNRGIRGEVEELVDFYNLDMIIAVGYRVSSPKATKFRQWATKILNEYIKKGFVLDDERLKQGTEVFGKDYFRELLERVRSIRASERRIWQQITDIYAECSIDYDKNSPTTHDFYAMIQNRFHYAITGQTAAEIIYTKADHTHEHMGLTTWKNAPDGRILKSDVSIAKNYLQENEIRRLERAVTGYFDYIEDLIERENTFNMEQFAASINEFLTFRKYQILPDKGRISAAQAKTKAESEYDIFNKTQRIDSDFDKEVRGMLGEKMSDIKEKTLRLIDGLKATCQSYGMGNDGNEYKIITQVFLYKFLNDKFGYELKNAKSEIAKKLTGDVKWETAYENLSDNERMLIQSAISPDVPMLEPYHLIANLWNQQGKGDFDTIFDSTMTDIAEQNADIFSTQTTANTKIPLFEALTPFVTDSAQRAPFARALVDKLVNFSFEEAFAQNYDFFSSIFEYLIKDYNTAGGGKYAEYYTPHAIATIMARLLVGDNADLHSMECYDPSAGTGTLLMALSHQIGEERCTIFSQDISQRSNKMLKLNLLLNGLVSSLDNAIQGDTLVSPYHKSDDRQQLRQFDFVVSNPPFKMDFSDTREKIAAMPARFWAGVPNVPAKKKESMAIYTCFIQHVINSLKKTGKGAIVIPTGFITAKSGIENKILHKIVDDKVVFGCVSMPSNVFANTGTNVSVLFFDKSATTDKVILIDASKLGEEYKDANGLKKVRLNDDEIEKIVGTFQRKEAVEDFSVAVSYDEIKEKGYSLSAGQYFDIKIDYVDITEEEFNNRMANYKQTLSEQFKESHRLEEEIMKQLDALQFNENVGSNEMKQFSEATRVQMPAMVHLTRIGYTYFGKLSEDKNGTVYDSDTNILLQVFERQFKNLNPGHEGEFLQVLKDIRKELNDDDLGRGFYNRLKAVSPVKLIDFDNIGNNTFHFTAEFTCKNGQDEFRPDITLFVNGLPLCFVEVKKPNNHGGMLAESARMNKERFPNKKFRRFINITQLMIFSNNMEYDALGGIVPIQGAFYCTGARSYAPFNCFREENLSGQKIAPFHRDYPYKEIDKTVEKQILSDYNCQVIHTSPEYQTNLGFNTPTNRILTSMCSPERLLYIIRYGIAYVRMEREVDGKIESTDQKHIMRYQQLFASLAIRQKLAEGVKSGVVWHTQGSGKTALSYYLTYILNDFYSKQNKVAKFYFIVDRLDLLEQATQEFEARGLVVSTANTRAELMEQFRSNQAQQGVSGQAEITVVNIQRFAEDKEKVRISDYATNLQRIFILDEAHRGYKPGGCFLANLFDADTDAVKIALTGTPLLKEERASCKVFGNYLHTYYYDKSIADGYTLKIIREDIETSYKERLSDVYDKLETLVQKKDIRKSEIIEHPSYVNELARFIMTDLKEFRKIQGDDTLGGMVICETSEQARRLYDVFQEEWQKYQPKPIKIKLSDGSYVVGEPEVDYKSKYRPLKAGIILHDTDDKETRKQIVKDFKKNMTVDILIVFNMLLTGFDAPRLKRLYFGRKLKDHNLLQAITRVNRPYPGMRYGFVIDFADIKRNFKETNEAYLQELNRFNDVDETGESAATDTFTQVIEDKEEILNQMKKVRQTLFNYTYDNAEEFSSEISTEEDKAVLLDLKQALESAKNMANIVRTFGDDEMKEQFAKLEITKLPQLLSEVQRRISIINQKEAFNTNEETKTLINEAMMDIEFTFSKIGQEEMRLISGGVELKEKWQRTISSFTQNFDQDDPEFISLREAFMERFKEHGFVIDTIAKFNEETQALDEIIGRLQDLQKRNNVLLKKYKGDEKFARVHKRIREVNKQREDKGQKPMFSFLDEEIAAILNIIKEDVDAKVYDRNDILKKDAYFGRTVMALINGCLFHFPQIKPEMEDYKFIQTRISQQYINQYNATYGISMKLNRIKAVLSEKGISQTWLAKKLDKSFSMVNAYACNRIQPNLETLQQIAEILQVDLKDLITDKKDRMGKTVTTYLIDGDPKGTQYAFISNKICQMFVVPRSNLSYLNTQEKLQKPAFYILLGEDESTKPQAYIGETENFKERVKDHDSKKAFWQKALIFVSKDADMTKVDVQYLEHKAIAEAKKANAFVLSDNKQIPKAPNLPEHQQDSMDEFFEDVKFLASFIGCNIFDVSQPKEEHLFYTKGRGCNAKGFYSSDGFTVLKGSTVAKTMVPSFNWKEKREKNASRLHFYMSKAKLKKHLLSLTKEQITNIVLELYDARKEAKDYLEFYLAPDCNAELEKSKKAIRNEFFPTRGFFEKPSFAKCRKVISDFQKLKPEPTTVADLMLFYIEQGCEYTLEFGDMWEQFYTTLEGNFDKAMRFIFLNGLLACYYERIEKLIDSVSDCGWGFYDTLQDIYSEYRMDKRNKLWRRQQMARVFKARMILYAAYGHCIIREDGSYYEHPHWFELAKDKWAQVYKTTGTPCSCWMCRGFEYDRKEYKKETLRIIRESMEMLYPFGHKIKTKYQQYTSKGIICLYFLEVQYFKRIIQPYYTFSNEYHPLLYTFLSESNVNKSFQVLMRNVRLNFRQQERSHLMENMIYNDLIRRGYSVDVGIVELTRIIEGRRRSSQYKIDFVVNVGNDKLYIQSALHVDTPEKKAQETFSLRNTGDFFRKIVVLDGNSKPWTDEDGVMYVGVIPFLLEDIVAEAIGMAQSFYTKWQYVFLADAGCYVSREYRNFQTALVREISKYAKAVDAAVVAKTKGHYFTSCFVERNGKFVYINHSSGLSRRIGSVRIELDSFLIRTARHAEDYTGGTNQYCDLLRLQSMIDRLLAMTDGAILARLCGNVTAGRFDWRKYCTPQTYFGREVCVTPLLCSYGQIGYAVHFPYSDMPEVEYDWELNSLTIDGEEWRIYLQNTRMSTKRSYKAEFLRWKAEVEKKHGKMIYDRLSEVIDTDDDLAVGDTVLFTNDYGVTFGPHEVLGFCRPDSFLCPHRYPEDEDCGIVFSDNDAYWFPDRPGQLTLVQKGGADVMTTTEQITNVATALGWSVETDASRPGFTEFEFRQYTPAGQDFGFSVEMRNGDPDSLLQELEKYYEAYDSDYEAYLWIGTDGHGKNGAPYHIKDIVSDMEAAEAMIDTLYETLKTALKMIEDNTPEGKWLLELIRGHKSVTVMDEKKKKGFREAVAECNGRPAAEFFDEMSRQAKEHFDHAMREVIVSEHLWGKIKEVNDYLINELHLSEEATEKRIRRMEQFVMDFAKRVDHPLCRFKKWRTLGYHCAVFEKDWVFAYEVFDEGVIVRDMANTALLAEMANIGEFARTHGMTVREAGNYLNRYKGLDFLAEHYEAEHLSATAYRIMVSEDSAVRGMCGKEICEILFEVSDLYFLYSPEGPDRVKEVVSIYNIGRKNGKTECHRLTGESAHFIPILQIRQNHELSVAPYPVFGAMWGLRGGGXXXXXXXXXXXXXXXXXXXXXXXXXXXXXXXXXXXXXXXXXXXXXXXXXXXXIIVKIMTVAATLLAFASCSKDDDGPSGKIDLKVQAVAPTTEDKVSDYSQFTVTVSSERDGKTMTESLDASGSATFNLDIGSYGIEIRGKENGKEYFGTTGMAQYGQSTTVSVDVENLSVHYTGNMDGIVLSELFYNGGTYGGTMMHPDQYIVIANNSDREINVSGLALAQASNMNTLPCSDLTSLLPDYVVAANIYQIPAGQNYTLAPGEVYVIASQAQNHTESYTPNPEKDTGIPVDLSGADFELADNDAAMSGSAVDNPKVPNLTKIANSMPGGVTAWMHPYGIRPLFLFDASGIEWSSFKSQNGFTYNDRPKKDAAIQEYQGYKVPTNLIVDAIETTSATTPYWGNYTSKSLPVTVDKSYVQATIEGCHHNTFMYRVKGTDGKFQDTNDSSVDVKIEHRSDFKGYPEGWRNEMKKLIFIAFFISGLCSALFAQTDKATVEGVVRDSDGKPLSFATMFIAELGTGVSTDLEGKFRFTGTKGTEYTLNVSYLNHVDKEVKVKAGSPEPLVIVLEEQSYELAEVVVMADYKKNQGSTAVINQQALEHIQPTSVADVLSLIPGGLFRESSATGFNRISLRQSGSDDNTSLGMAVVMDGIPQDNDGFRASIPGLSTDEYSDRLGMNRGIDLKTLSTDHIRKIEIVKGISSAKLGNLSSGVIQTTSKIGITPAQLRMKVDPLTKLIYLGKGFRISPKMGYLHTGIDYTSVYDDRRDPMSKYSRLTGQVTYNNSVDVGDKTLFLFFKLSEVYTLNQAKEDELTQDYNESFRNKYSRTGASFKAQMYDLGKIVDNVEFIASADYTYDLIDRNRLVQTGTPLPSPLATEEGESEGIYLPSTYYSPFQIENKPLSLLTQLNAESLFETRSFRHKVIYGLSWKRTKNYGEGVMVDMTRPPYPGNNEYVRPVPNRSIPALSVGAAYAEEQLKHSNRWFDFELNAGVRFTQMFNLDTKYTELRKLQVEPRINAALSFNIDLAGGKSLRNMFRFGFGQENKLPTLDYIYPDRVYKDMIVLNAYTKQDDPFNHLITYTKIYDVTNNSLRPNRNTKYEAGWDVEYEGYSLSLTFFKEHSDRGFESVAEYSPVRYTRYVDPIDGQPIVGRRPEKEDYVADPYATFVDMDIVRNSMKVEKKGLEYLLRFPKIIPLSTTVEINGAYYDTRYSSGAPLQYHPAFRDDDRPQPYVGIYRRQDITRQRIFNTNLWFNTNIPRYKMIFTTFFQFIWLNEEMRINGDEYPSAYFDTDGRMHTVDDRILQSIKDGHTVWRHYHIYKEDFSETLPVSLTVNFKVTKEFSRMIRASFFVNNILDINPLYKNRYNQNVRVWQKSFFGAEMTFSFMQTEFENRSLRPGTDMRDAYLRNPALIHRMVGERRYFSAENPGFVREKPGTIFIAADGASGRQEGDYLPYEGQEFRDFSVRADGYKQGDRATFFARIGFTAGGNDNVGWSALRNPGLYWPYIVADSTGGDFRYEKYDLMCGYSFRLGRFDLGMSGEYTGDFAFRQNDPRIEDISTWLTFKAGAAYAFRRHVIALNAEFMHHRQHADVKHFRTGQFAGFFIEYGFGMFDYIFSPIFNSMEQRQHINAYGVNLTFNSDPSRALRLNLLLGYGRETMKTEENNYKVNLYRAPANTFDADLGILWNDRRWGAEFLVKAAYEDKKGTENIFERYISSSQDGVDVYDFRKIGEQNRYGMKRLDGSAELKVSRFLGRHYTVSLLGGVGYMMREETYKDHDYLIRNVLLTPSLGIGARYSGEKFDVELRGCWSHRTVPESRYEVGVDLEKNTEFQHAFTTYAYYANTAELYTAELTVARHFRFGTFGLRGQMLCGRGNRIPEAVYDLSRYEQAVPSTSQHTISRTPDRHDSVWFRVSLFTVFMEIKVLGGGCSSCSQMYDNARIAVDELGLDLEVEFIHDITKALQYEVLQMPALIIDEKAVSFGRDLSVDEIKEILKKYRMKTVKIMLPLLAALMFGNGVVRAQNEAKHDKPAVEVVVFHGVKQCQTCQAIKKNSQEVAEELAADGKNVSYRVVDFSKPEGKDEAKKYEIAWTSLLLIRHDAGDKETVRNISKFAIENARTNTEKFRKQLAEDIGKLLKEMEQFVNSLLDNCNLPVLTAFLLGILTSVSPCTFTTNVMVLGYIGRDMSGGRRVFANGLFYTLGRIVSYTVLGLICIPVLKKGASTFFVQSLVSDYGGYILAPTLIVYGVFLLLGSKFPFGKFGFRASESSKRLRGSFGAFVLGLLFALAFCPISGVFYFGMLLPMAALEPGGYLYPVVFAVASGILVVLIAWIVAFGMSSLGRFYNRVNQFQKWLNLIVAVAFILAGIYYFVIYYIMKKLELMKGPFSPKEKIEYAEGSIVSQEFIHNRAGNLTLFSFDEGQQLSEHTAPFDAVCQILDGEAEIHIAEDVYRLTEGQMLIMPANVPHSVHAVKAFKMLLIMIKGMTEEDRKVIHSLNSGKLKVVHNTPIQAKFFWDYDKNLKPGNMTKRIIFIFAALCSLQARASVRPAQADTVRYTSFTDAAELLQPVQPTHLDGVILPMRGSGNWFVGIAGGSTAFLGTLLGCEDLFGRIETSYSLAVGKWFTPSVGARINYSGSRFKDARLSTQRYHYVHADLLWNVLGRGYARQEQVRWGLVPFAGIGLLHHATNGHNPFAVSYGVQGQYRISRRVSAVAELSGTTTFQDFDGYGRANRLGDHMLSLTAGFTFHIGKTGWKRAVDAAPYIRRSERLAEYVDFLSEENRRYAGRHDCDRRTLAELKKILEIEGLLDAYGHILQEDGEVGKDYPVNNYSGLNSLRARLKNRQWDGTSPLDTTEVRPGGGSVSVRVEAGSANSRYGCNARRDSLTADSVAFRPAGGECIGAPVYFFFSLNTARLTDPSQLVNLDELVRVATKYGLTVKVTGAADSATGTVGINDALSVSRADYIASELNKRGLPSDRITKTGEGGISDYVPTEANRHSKVELFFDKLEKTEIHPMAKAKQVLDVRVSKGITTSQSNEHQRRWTEKGWEQALEKGNYDPSREHLNFEIVSGKVRPVDKSRSIPERMAEILDRRGIKDPNEGLDEPKYRTVVNIIFGGSRDRMRELAFGSQKVNFDKGADNSDVERKRDIERWAKDVYAFVSGRYGEQNIAAFIVHLDEINPHVHCTLLPIKDGRFAYKEIFAGKDKYEFSQRMKQLHTDFFTEVNTKWGMSRGRSVSETGARHLTTEEYRRMLSEECTTFEENIDRHRKVLFSIQSDIRLAERRVKGLTTMVDNLEKSKAEKQAQLSAAERDLAANSDDAAELEMLIESLQKELQGIDRQLADKQGKLQAADRQLADLKENMDAVQQRTEELRAEAYRYSRDVHSKVDTLLKDALLEGLVGEYRNLSARLDAPQRQLFDDTLVQAIAEQGAEVMHCATMLFLGMVDDATTFAETHGGGSGGSDLKWGRDEDEDNRAWALRCMRMASRMMRPAIGKKPKRMENKKRMPATVLAQMEVFDYLKEKVGERKTRTEAYCDLLDKAMAGFVSSYLRRQDYELRPCQCHVTVSDLAVEWRWHRATVRSFLDTLESFGLLTRIRLPKSVVITMAVQSGQPAPADDVQSVSGLAAQLREVLSDWVVGYADSSATGSACGQLVRSAMTASGVRVDPDKASKDDDPLAVGIHATAMGCIALAAMQRVLRRSRFDDRLEFMDFFRLDLGGEWSSLIETSKVLAGLILDAEADGTTTEPDATQEGLKSFRKSFLALAAHVLEEADMMWIAVHLAFAALPFVLTAALYSRKRRFPAGEGDARARDAKARKFYAQLLLVLLLLYHYAYTNGHPSGFGVLLSTGACAALFSSRRTDRWLRGLSGRPRAFAELALAAVAIGFVPGLYPVAVTAAYCLLAALFYPSARAMSECDGKEVEPGRAEPPATSAVPHRYDHRAGLPHDADGGSSDISAHDYHQMYRQMVYWINMYRTWIKVADDNLYKEHIISRSDRTDYVVSRTLVLRAFKANGQYAEGTTWEIPEHELDRALATHRKQDASFRQRIKKAAMYLSPADAEAIIRLATYGIVRLELVIPPVPVREKPYYLMNMLRHFYNDFMALVPLQLPQLIDVTTMEKPQFYGDYVLLTFPLRDSYDLEEVMDMFEDDMELITLYHHIPMRVGEFGYSTCAYSNPAFGQMFKMNARTEEDGKVHVVVATVYDSLELMYGDLCLDLELHARSGTFKYKKIKEEVLMDFLMKNRKSYSRCPALLAVLTVCSTVLFLFSSCGSGNGKPSSVGSDDPADTYRGYLSEIRRLDHLTAKELAGHLKRWQTVKDSVFARLRRDTLGLPGSDACKVCEGIHDSLRIEFSRLALSGPRTYGELLMLKERLSPYAADEELRRAAETVRPFFASLDGHPACRDDRRQVLSTYRALLAESIRDGIHSRDDLTAYIAREDAVFRGFLTHLHELGSSDVADIACDTERCCSQVFLAAGRGEIAWRDAMLFLAMRTGRRLIQNAHTCIDDIRNRRVKTPQQACAYIWMLLQPYASMDGLCLALLSPQERERLDEIAAQTSAAFEALGSILQSTGDRQDELPGMLMEAFIHTLMNMIFYFSYPKFISLAANLYIIFNKIANRNHILHKNKYHIQQYDYQMAKVGYIFKANSYDALDADKEWMRQYGCVQVVEEECAHEALRPQWKQLMASLGRGDELVVAKFSNAVRDLRGLAALVELCRIKVVRLVSIHDKIDTLGELFPDTTAAQVLEMFGALPEEVAVLRKSSSHIMQLQQTIKPPVTKKAMSRAEREKTIVDMYNNGYSIDDIWKVSGFNSKSSIWRVLNKYGVYLNRGRTSGPRVKKQQDETKMHIFIWGIIFNSEAMLDIIIVLAGFYLFCGIVRVLLGGFGKSDYQRDRMTKAELVALITHQTGVEKTAAEAVVEAFMRNIKETMIAGEDVFLRGFGSFIVKERAEKVARNITKNTTMVIPAHSIPAFKPSKVFLEAVKEGNKKGMNGMNKTEGMTVEEVMRRDKRFRYMLLARLQSDCEYYLGFGNRSTGRLWAGDEARQIEWMTRLYDGFPEDEKPRWLTREEIAEYANRMLVDRMKKQMIWSSMDMLDDEAREQYQELQREVQEDDTYTVSDAEWADVVSGSLTDERLNLDKKIEGVIIAFASVGTWRGPRQGYQILGSNIADILYSQCDDAEWYGDSYNIRGRMIHHDGMNYALYRIAKDRSEAERIADKIYSGEIDEVGFRKRTRSLYPYVADIYGWKIRRRKLHAMFNPNAIVCDFPLPPCLVPFFPAWSFAREIKSPSDEVETSEERDEKVSQTNIKIQEVMKKIENSFAVTGFVAKDAEIRQFTNASVARFPLSVARQEKNGEDTKRVSAFVNMEAWRKNENADSFDVLTKGTLLTVEGYFKPEEWADKDGVLHNRIVMVAVRFYPAVEKEEEPAEPAKTTKKGKKMGPVSARFSLSERQTLARSTFLSRIATRFRHNACDTQPLLSEPPFVIPSGCAVPFFRTRPFARERLSRFAGGVGSRRFSFASFFPSFPSLFCPDGPDAADTDASRTPFTRPSFDGPSADAVPRSVRWHTIFCRFHATRGRFAYPASMFFPGSRRNVLHSCRWAVGSFQIRECRCSLFSPPFPRPFSVEVAPSFFAAKLGCRRARPVRSMEVTIEHSFCPYCDEAIELYFRIVNTILFSTHEDDLRAGMEHLKNQTLLDEYFVYGYGAHHLWVCQRRASDKSKIFEHRILIARFMTQIAMKFVQWDVPELDGLKDSKVYRLRERLNNGDKLTREEKNWLTRNVWECCRFRRGIALGGYLFDFSDVLKRYFVKQYGHITEYYAIDKTALRSMLYGRIEVIVEVPMYEYEEKSDIIGSPCSLMNPYKGYTEGTIVGDYGNTVVVRLTSGKEIVEFRDEVIIYNMADYATNLFFASTENERDLDKVEAFLDDNFADCFIERSEDMLDAQFSSLWVYPEKEIDKLVESLDAKDEIYIRILTYALKDEYVSFRTFSQGTWNIKFMSPQKVLWLFLQGFTIKYYLCEAERGDFIVNRQALTLQKKRHDRYLCDTILIRQTESMLGDELGTEFCWPKEKKSKYRIAFYSISEVPFPKDMKNLCNPRKRSIIGVMILFQDNLTNSLYFSNDIQLINRISDSGAIIPGFWLRLMKKIFCLVCFFSALFSLKSIAAVPEGAIPFVFDGHLYLQSTLNDTIPVTLIYDTGADFLYLDEDYLKLKNLQNAFGRKGKAKMGGAGNGEPERIEIFIDPITVHCGAREYQNEITPIIKLRDLLGRHTDGLLGNTHLLMNPLEINFSESYLRQLKGPLLAEQLDNYVKLDARFEDNRIDVKATLQIDDENSLEGWFRMDLGCGSTIILTNETASAFNFMDVPKAYFCTQAGGIGGGSEEVTIRAAKFFMADTLENLVIDYSLNEKGALSSDRPYIGIIGNEIWSLYDIVLDPVSSSVWVKRNENQGTYAQSSVTHMATVDRTDICGGWIVNGLYKGGVAEQAGIEIGDIIVAINNRPVKEITWEEQRKGLELQGETTYTVQKPDGQIVSYTLFIGKQIIMLFPKNLWKGRVYVDMESGPRTIGKDAARRHTPFRFVFECMIHIIRRKTRGMKHPVDIDNWNRRENYLFFRDFANPYYSVTSQVDVTEAYIRAKALGIKFSHYAMYASLRAVNSIEALRYRQVDGKVWLYDRIRLNTAVAREDHSFASVIIPYKDTLEKFVAEARGIIAAALRGEGDAYGADSEKDTFVISVNPWYSFTGLQFQFPQNAGENIPLSVFGKIMVDMQGRRTMPVAVSFHHGFVDGYQVGRYWEAFQHNLDTLSMMNTQIKFTTAAEAVKVIKSGDHIHLSSVASAPQCLIKAMCERGANHEFKDVHIHHLHTEGPAPYADPQFEGIFQLDSFFVGGNVRKVTQSGYADYIPIFLSETQKLYRSGTVPCDVAMIQVSTPDKHGYVSLGTSVDATLAAVETARTVIAVVNKHVPRSFGDAMIHSSKIDLFVQDDTPLEEAHFTEPNEIETRIGKHCAALIEDGATLQMGIGAIPNAVLAQLGNHKNLGIHTEMFADGVLPLVEKGVINGEAKNIDKGKMVSTFLMGSQRVYDFIDDNPGVLMMDVGYTNDPFIIAKNDRVTAINSALQVDITGQVCADSLGTKFYSGVGGQIDFIYGASLSKGGKAIIAMPSVTNKGISKIAPELTCGAGVVTTRNHIHWFVTENGAVNLYGKSLQERARLIISIADPSAQESLDRAAFERYGQHHHYVKNYMGKMSNERKLRLIQVAKEFKVGLNTITDFLQKKGIKTDGSPNTLVEPDVYAVLEKEFGGSRITGNERESIRERISQKQATITLEEAQKQTREEEQEVIIKSNVISVKDELPQPKILGKIDLSPKPKPAPKPVSKPAAEPVPEAAAPKPQPAPQPAAPKTEAAPASETASAAKPEPEAAPKSDNIFRPAVQTLTGPQVLGTMDVSGFTPGNRHKRKRLSKEKVDVTRTPAGSPKPGSNGKSAAQPGRGQGPQSNQPRPGENKKTRKDKLKAPKPVVRPEISDEEVSKQVKDTLARLTSKNAKSKGSKYRKEKREAVAERMNEEFQREEQERSILKVTEFVTVAELATMMNVSATEVITACMNLGLMVSINQRLDAEALVVVAEEFGFKTEFVSADIQEAIGDDEQDSEEDLVPRPPIVTVMGHVDHGKTSLLDNIRKTNVIEGEAGGITQHIGAYSVELNGQKITFLDTPGHEAFTAMRARGAKITDVAIIIVAADDNVMPQTVEAINHAQAAGVPMVFAINKIDKPAANPDHIKEQLSQMNYLVESWGGKYQDQEVSAKKGLNLDKLLEKVLLEAEMLDLKANPNRRASGAVIESTLDKGRGYVATVLVQNGTLHIGDVMLSGIHTGRVKAMFNENGQKVTEAGPSTPVQVLGLNGAPQAGDTFNVMEDDRSAREIANKREQLQRIQGIMTQKHVTLDEIGRRIAIGSFKELNIIVKGDVDGSVEAMSGSLIKLSKETVQVNVIHSAVGQISESDVLLAAASNAIIVGFQVRPSASARKLAEKEEIEIRLYSIIYDAINDIKDAIEGMLEPVMKEEIVCSAEVMEIFRISKVGTVAGCVVREGKLTRHTPIRVIRDGIVIYTGKLGSLKRFKDDVKEVLTGQDCGLNIESFNDIRVGDVIEGYEQVEVKRNMDNLNLISNFAEFKELKNIDKATMIGVLEDVFRHALQKQFETDENFDVIINPEKGDLEIWRNRTVVEDGAVENPNMQIAVSEVKAIDPTYEVGDEYVDPIKLESFGRRAVLSLRQNLASRILDLEKANLYEKYSEKVGEIITGEVYQVWKKEVLILDDEGNELILPKTEQIPNDYYRKGDTIKAIVKSVEMNNNQPRIILSRTANQFLERLFEQEVPEIFDGLITLKKIVRIPGERAKVAVESYDERIDPVGACVGMKGSRIYSIVKELRNENIDVVNYTTNPQLMIQRALNPAKISSITIDEEKKTASVYLKPDQVSLAIGKGGLNIRLSKMLTGYDIDVYREIEEEDVALTEFADEIDGWVIDALKACGCDTAKSVLELPVEEIAARADLELEQAQKVVEILKAEFEEMIDCTKITEIANAKLVGTDLFVVDCTCSPANEVELLIDSDTSVGIETCVELSRAIEAEFDRDTEDFSLTVASAGIGSELKHLRQYRKLIGKPVEVLLKSGVKILATLDEADQEGLTLSYEEKQAVEGKKRKQTVRVTRRYPFSEIKYTKEYLDFKMISNQAYIHPDAKLGKNVTVEPFAYIAGDVVIGDDCWIGPGAVIHDGARIGKGCKIHTAASIACTPQDLKFVGEKTTAEIGDYNEIRECVTISRGTASRGKTVVGSHNLIMAYVHIAHDDVVGSHCVMANRVSLAGEVEVGDWAVIGGHVAVHQWTRIGEHTMIQGGALVGKDIPPFITVSNNDPVRFACVNRVGLSRRGFTPETISQIHDACRILFQSGLNYLNGCEEVEKQIPQSPERDRLIRFIRESQRGIIKPYSQSNEKDEMAAKQQTLKAPISFSGTGLHTGVKVTMTVHPAPENSGIVFRRIDLEGKPEIPALCDYVTDTSRGTTIEKDGARVATIEHIMSALWTLGVDNATIDVDAGETPIMDGSAKEYAKTIVETGLQPQEAERTYYHVTEKMVYTIPEKGVAIILYPDDEFSVSLHVDYNSKVIGNQYATFDPEDDYAAKIAPCRTFVFLHDLEPLMKMNLIKGGDLDNAIVVVENPVPDDQLEHLKKIFNKQDIRITGGYLNNLELRFNNELARHKLLDLLGDFALLGKRIKGRVWATRPGHFANTEFMKQVKRTIRREGEKPRFQYDCRKPPVYDINDIRRMLPHRPPFLLVDRIFYIDDTTVAGIKNVTMNEPFFVGHFPEEPVMPGVLIVEAMAQCCGMLVLRSIPDPEHYSTYFMKIDGVKFKRKVVPGDTLHFEVQLLEPIRRGVAVVEGKAFVGETLACEATMMAQIVKNKEMFIALFARKYRKYYSKIVFLPKLLINRNSVASPDRTPRPPKLQLPFEQKKNDAGEWAYDHRIGLCVTLIAYLVLAIAFMVGKIVVGAKPSVQGIIIDTKTLAELEAEKMRLEQEVRARQQAQEGGDWRDVRNQYSNENALEERSRDDRGSMSSSLKESAEAVGERMQANRDAYEQGLAEERAIRERMGRSGKDDRTQDSRARGRVTVSFSLTDPVRTRRYLEVPAYQCEGGGEVVVGITVNPSGEVVAAKVASGGDDCMREAALEAARNSLFNIDDSAPARQSGTITYLFIPQMHNIITTENILLIGALLLFVAVMAGKAAYRFGAPALLFFLGVGMLFGINFISFHSVEATQFVGMIALCIILFTGGMDTKFSEIRPVIGPGIVLATAGVVMTAVIVAGFVTLIAPWVGLAVSFPAALLLAATMSSTDSASVFSILRSKKQGLNENLRPLLELESGSNDPMAYVLTIVLIGVLSGGAEAVSVPMSIVKFVIQMVLGGLMGYAIGRIGVWTINRINLSNHSLYPVLLLAFVFFTFSFTDLIGGNGYLAVYLAGLVLGNNQLTQKRSLTIFFDGFTWLVQIVMFLTLGLLVNLDELLQPDVLMLGCLVGAFMMFIARPVTVFACMAPFRKFTTKARLYVSWVGLRGAVPIIFATYPLLAGTEGARLLFNVVFLVTILSLLVQGTTVSWMANLLGLGYAEKSPAFGVDVHEDIPSIFTEVLVNESMLQGGATLKEINLPENTLVMMVYRDGDYFVPQGNTELKVGDKLLVISDRGEELESTYKDMGVDEVLKLMADYKYTPADFKSDQEVRWCPGCGDHAILNAVQRALPEIADQTDTPHNLFTFISGIGCSSRFIYYMKTFGFHSVHGRANAIATGVKTANPRLNVWVTSGDGDSLAIGGNHFIHAIRRNINLNAILFNNEIYGLTKGQYSPTSKLGKITKTSPYGTVEKPFNPGELVIGAKGTFFARSIDMEVNLTKECLIAAAKHQGMSVTEVLQNCVIFNDKTHAAFAGDKATRQEHTITLRHGEKMLFGANNEKGLVFEDMRLKVVTVGQDGYTLDKILTHDAHTKDTTLHSMLAAMKYPDYPVALGVIRSVEDEIVYDQAVEKQVEEVKAQSKIHCVDDLLHSGATWEIMNENKVQELQDVVIRFSGDSGDGMQLTGTLFSDTSALLGNGISTFPDYPAEIRAPQGTVAGVSGFQVHFGAKRQLNPGDFCDVLIAMNPAALKANRKWLKPGATVILDEDSITEEHLRKAGFATLDPIRELNLEDFNVVVPNITEMTKAALADSGLDNKAMVKCKNMFALGICFYLYNRPEDHAKHYLDSKFAKKNPAIAEANKRAIDAGYNYAANTHQFANTYTVASGQMEKGTYRSISGNVATAWGLCAASEKSGLPLFCGSYPITPATVILEELAKRKDLGVKTVQAEDEIAGICTAIGASFAGNFAVTTTSGPGLSLKSEALGLAVMTELPLVVVDVQRGGPSTGLPTKTEQSDLQQALYGRNGESPVAVIAASMPSDCFHYAFEAGRIAMEHMTPVVLLSDGFIANGSEPWKIPSMKDYPTINPPIIDKTEDGGPFMPYARNEKLARSWAFPGKAGLEHRVGGLEKDKLKGSISIDPQNHQEMTNLRAAKIAKIADYIPHQTVYGDPEGDLLVVGWGGTRGHLQNAVDKMRAEGKKVSLCHFNYINPLPHGVADIFKRFKKIVVCELNEGQFANYLRGKLQQFDYEQYNKCEGQPFTVTELTNKFHSLLKMTGDRLKLLRKTIGLTQEQLAQRLGIGKAALSMIETGKAALSSRNKNILVQELNVNPDWLDGGEGEMFNAEPDLTAYMHRTDNTLPLQSVPLYSIEGTAGLVPLFADHAQTRPVNFIHIPNLPKCDGAIYIVGDSMYPLLKSGDIVLYKQLKDIGDIFWGDMYLLSIDIDGEEYITVKYIQKSEREGYVKLVSQNPHHADKEVAVDRIRALALVKASIRMNSIRMTYPIIPELYGIVARKLLDEIGEKSFYSGSFSFDYGSKECRFVASIVIYRSKECLPEGDADRIDDLVPVWWEFHTSDQAGERPNDFSFSELKEYLFMSFEKLNAVLRLSDAAILESGRPVRIETLRLPSAAPCHRAELKNYMNIDVLKDLSPAEPASAGDLPPFGLFAAGVYPFLEFRWFHEAYYRVLEAFAAGRVRRLIVTMPPQHGKSVGASTLLPAYLLGRNPDLRIAIASYSASLASKFNRRVQRIIDSPEYAAFFPETTIKRGARPPEYLRTADEVEIIGHRGGLLSVGREGALTGNRVDMFDYHVKADTILFQYVTPDGRDEVVKFPLAGFCENYLMQFVKMTDFVKRLIYKTLLQSLSLSYFVYSANNLIFIKINNNQILAKMNRYKQPKTEMKTLDLIFFGLKGKINGPKALKELESLGVIKGNKIVYDDNDKILEAKIYAIIDKYFGQHMKKLFLFVLTAMMICSCSKSETEDNPNPNPESSVTGMWLTPDALTFESTGGSETVWLNLNYSGTSTNAQWKLTGGESWCTASKTSGGDNEQITFEVTENNDPDERNATFTFTCGSVSTKLVVTQKQKDALTVTSSKIEMDSNGGIAIVEVKANIDYEYEIGKDCKDWVTLKETRALQTTMLSFDVAQNTDFEKREGTITVFSDGLSETITIYQAGEEPTIVLTQNKYDVSGDGETIKVEINSNVDFQVTIPSDVDWIKETWTRAISTHTKYFKIATNSPNQSRSAEILFTNTEYSLSEKIIINQKAASYVTVHVVQKGGLSDVLVDKELNPESIISMKIIGELDAEDFLTIQNMINLKNLDLEEVNLTELPTKAFYKMKTIENLILPHTLTIINDSEFYQNSLKSIIISSNVETIGEYAFYECPLKSINIPASVKAINKAAFMNCSSLATITFSKGSMLTKICGGKGFLSHGEKYYYGAFANCTALTSIEIPANVEIIEEAAFKNCTALTTVTFENNSSLKTICGATYDYSYYGGAFSDCISLISIEIPASVETIEAAAFKGCSALITVSFEHESQLKIIQGSYEKIYVGHSPNGYNRYYRSGGFRGLANLTTFDASNCSQIESIEPSAFYHCSKLQSVKVGTMIPPTCGIDAFSELNSYTILTVPKESIEAYKQANEWKNFTNITALNMSIPNLIPHKTLYISGYIYSYYAFVFIFEFPEHISKHILQFHTFFLHITHRNRSMKVSVYLKKSDSSTSNICFRVREKNVDIKVVSPLAVYDKYWDSDTLSYKRTAAVPATEQKRLPRQIAAIIEHVEKTFSDKADSKWLKQAIEDVLYPARAFERNHPNLLRRIHEYLVKFDGADRTKEHIIRFERKMSRYHDYQREILGNTDFMLFVETVTLEQMNDFRDYVVNEHLLQQEHPGFYASRLLVKRKPKPLSGTTVINIMNLFCTFLHWCKKMKYSDNEVYALYGCKEPTYGDPFYLTSEERNILYNADLSDCPKLSIIRDIFVFHCYVGCRVGDLYRLTRDNIKDGFLEYMPQKTKKCQAKTVRVPLHEKALKILEHYDKNADRLLPFKTVHTYNLSIRELLKHCGIDRMVTILDTHGYNTVQRPLYEVASSHTARKTFVGNLYKQVPDPNLIASLSGHVEGSRAFRRYRTIDDDMKRKMVEMINMKVTAFIRKTSAKNNVTNLARVYFRVRDIGGVDIKAASELSINPNHWSAEKQGYKPRVALVSEEKRMNFDRDIQQITHLITKEYHRGVDGNWLKGLIEEYHHPNINARGGNKADEYLLSFQIKKYMDETPLADESWKHHRDNLKKVLRYERFRHEVMHQRGFHLCIDSITADDIRDFKFWMQEEYRYVEMYPVFYKDELPRDVTQQRSENSMSGSLYRIRTVIKWCIKRGLTRNNPFDQYQITQPMYGDPFYLTLEERDKVYYADLSGMGATYPVYRDIFMFQCLIGCRVSDLNKLTKANIVDGCVEYIPQKTKLEHAGTVRVPLNQKALDILERYKELEDALLPRFSHFGYNKKIKEILKYVGIDRMVRVLDPKTREDVARPLYEVATTHTARKTFIGNLYKQVKDPNLIASMSGHSEGSRAFARYRKIDDEMKKELVNLLDMNMDEQQLTYEQFKEDILRWKNTHREEYVRFARLMTNGDEKQYLAICRAIFRQLPKIKTEWELCWNDDSAENFANIDLQFKENAVPGQIVELYRKQREESSPLPDTPPTTLWGRMKSFFSGKSKDPGITLSAPLVLSWLYYGKSFEAMVGMVDRQMKNPKADKADKMSCSFVIRQIIDVSIKSGFRTQTDWDRYFSMNEAIEKGDVGEWALQSVTEEMDSGTEEGHNTGTGQTSDNTQTVDDAQKTRGRRKAKVQPLVDYLDCNDKDAVIGVIRKFISKYDTATEQALTYYALNELGLLTNMGSAKEFAAALTCQFEDMGGIKSESSYRQAIHTLTTTQHVAKDGVNKMCVMINGDICQTLLDELKTDLMETLPNPDESGETGMITIESLVEQGANVKLEVTPTDLKMFAESIVQRTIMAQQEEHKAAMQREAEEGWLNTRQVRELLNVCEGTLNLWAKRGYLVPVKVGNKNMYAKSDVHRVQTGGKSESVTSYCKKRNGMKNTRLELCNRIRMETEHTEDTGFPLDVFPQNVQSIILDMTKYENYKIEFIATSMLSAVSAALGGTYRIRIKGDWQSNGTLYVILIGRPGLGKTPPLEAAFRPIRKHDYALFKAYEAEMEAWKAAGENGRKPVLKRTIVSDFTPESLMLTHNNNPRSVVILVDEIMGMFNSVNRYTNGQLIEQLLTAWSGGALDVTRVSNTIPVHIEHPCINIIGGTQTKRVHELLRKGFEENGLLDRILFVLPKSPEISPWINRDDDGEMTSLAAARWERILDKVFALEYDTEAEERMPRVLSMDREAKEYFFSWWNRKVERINRIEDDVEVDSREMKHPVHVARLALIIQVLRYASDESHLQFVDTVSVKAAIRLNDYFEDSYVRIRSFMANDTCEEPPKVLLSLLPDTFDTKTAIAIGKELQGISERTVMNYLKELCHSRLLRKAKAGHYEKIVYESGKYSMNENEMSEYRFHLQKYRPGSKTVCPGCGRKGCFTRYIDEEGLVSFPDNVGKCDHINSCGYHYTPKEYFNDNLAVKENLTGQDRYGNVIPTVIKPAGKPSPKPQPQISYIPYAWVEQSMQRYDINPLYGYLTTVAGKDKTDWLFNLYKVGTSKMWNGATVFWQIDVSGNVRAGKIMGYDAKTGHRVKQPFNQVSWVHSVRKIPDFHMRQCLFGEHLLAYASSMARTVAIVESEKTALIAALFIPDLVWLATGGMHGCFNSEAMQVLRGRDVILFPDLKATDEWRCKVQMLQSVCKSATCSGLLEKMATDEQRRQGLDIADFLLMEDTPQMILAKMIQRNPALQLLIDELDLALVEMNKDIKQAMHVEAGKSFGTAETNENERRWNDDKIDRKNQEPTNHYDKTRMKLNFEIGPDGKVHPLGYQEKPLEVRLQERLDELNWKPFKSNSKIQPNCCAKFVFGGNHDRTLEMAFGNQSVNLEKGADNSHLHRCDEIENWAKDVYDWCAKRYGQENIVGFQVHLDESSPHIHALVVPVGIRPKSGRECVMWSAKFGKDRYEYGRILKDMHTSLYDEVGSKYGLERGDSIDGRNVQHLNKRDYIRKLTKEAKQAEKAVKGLQSMMRNLESKIFKYRLQLEEAERELASGKITLDRYESQKADIQKLIAEYQTKLEDKADKLHAKELELERLTADATKARSVVQPFRNHKVDFTPPQITEKVPLFGTDKWVERQNQHIAKQFTEIVRKIESLYRNDAARQVEAAQRNVLADYGEFYQLRRENKSLSDTNESLESELNTLLEQLAIPSVRNLIFAVADALIGGQPVPISSGGGGSTSDLPWDGRRPDEEEEAYRRKCLLYASRIVKHTKIRSRNRMKLKFNKTEDGDIAAVILDNTKQEAFSYIKMIAALLDGQPIECEYGEGITPEEQEQIKSLNDAIWKKVHPEGENGEMSLFNMQPIYIDLHIHTSENANNLNTNYDIAELVGQIKKLNGDSPFMISLTDHNTINKSAYLKAQNLDLNLIIGVELHIQNRAEAKSYHCHIYFNAPIEDAVIDSLNEILDELYPNKLPDRNDPNTPDIQKIINSFDTFDFILLPHGSQKHGAFNYSINDGENLDNAINRSIYYNQFDGFTSRSTKGLEATHQYFERLGISEFINLVTCSDNYSPSIYPRSHSGNDDDFIPTWMFAQPTFDGLRLSLSESTRLVASHEKPIRRSDYIGHVELQNEHIDVNVNLTEGLNVVIGGSSSGKTLFVDSLYRNIHQDFEGSKYIERYGVENMIVENTSGMTPYYISQNFIAENISDNNEKSIDKIEILRNIFPADDEINRSITTGLNKLHEVISEMLQYVEKIEDCERTLNALPNPGQLIVTGIVKKNALNILMPTAEEESLVKYPSNQYKIDLEAIETIRTFLENNPLIEDANEEINSIKTKLTLAAKAYTMFDDVSMVVKEHKQVVDRILKDELGQQQSRITNKDSLLKTVGEYIKVLTGFKHCKQELIKIKYSFQTREIEARGHKLSVINNFIFNEKVLVDALKYCLKSNINTIADVTPWNLMSRYFKKNPNVESYNDMTQRVYTKLMELNTRSYKIITKDGKDFNSLSPGWKTAILLDLILGYEQDTAPIIIDQPEDNLAVKYINSTLTETIKAVKWSKQVIMVSHNATIPMMADAQTIVVCENDGNKITIRSASLESEVFGQKVLDYIADQTDGGRTSIKKRVKKYNFKKYNMAGKGIYYESQFEEATIELLREAHWQYTFGDDIHRKYTDPLIEEDLRNFLAAQYKDRDLTTSEIDGIVANLRNTGGQNDYYALRNAFLLYRDGYDFAYSDGRDNPFRLEYIDFEHPDHNIFRCVNQFVMEQGRENRRPDILLFVNGIPVCIIELKNPTKQNATIRDAHTQICTRYMRDIPALLKYCALAVISDGAKNALGTIYTPFEFFYEWKKIENEDKAGKGLDTLRTLIRGALSPERILEILRDYVYFPDPTKEDDTTEIVCRYPQFFATRKLRDHILNHLRSVGGDGKGGTYFGATGCGKTYTMLFLARQLVLRCKKQLGSPTILIIVDREDLETQSGKLFCRSKQYLEDEAVKVFETRKELAEEMSTRKTGGVYITTIQKFAETTGLLTERSNVICLSDEAHRSQSNIGSKLSIQTEGEADKIGAKITYGFAKYLRDALPNATYVGFTGTPIDETIHVFGKVVDQYTMKESEDDGITVPIKYDPRLARVFLNKEQAEKVEEYYRLCADEGATPEDIAKSKAAMSSMEVIIGDEDVLRRVAKDIIEDYKRRTETTDRLQKAMITCADRKIAFRLYKIMREMQPEWFEKKKALNELVLTADEKNKLNDIAFVNMVMTRDKDDEKELYNLLGDKDYRKFLDSEFKSEKSNFHISINVDMWITGFDVPCLTMLYNDKPLSKHTLIQTISRVNRKFGTKECGFIIDYIGIREEMKKAMKKYGGEVGPQEDLDVAHEVLQNELQLLQERLSGLVFDRFFGNNDLARLQFIQKAAEYILANSVERKGEVSFLKLFKEHVKRLRSAYNICNPAGILTEEEVAWSQCFMGICSYVNKMTATEHDTESMNRHVEQMVQEAILASGVERVMNEGVEENIFSDSFAKEVEDIKMPFTKFQILCKLVAKAIRAYSRTNKIQAEHFQKMLEDTIDAYNTRDKLTFTNEVTQNVVNDVCDIVSYKINGLSNKLMNILKELKADSEKFKVLGITFEEKAFFDVLVEVRDKHGFEYADERCIELAKKIKTLIDDTAVYADWLNNDNLKSKLASQLTYLLYKEGYPPQWDEEVFQKVLEQVENYKKHEMDAGNVKWVRLGDYIEQCDERNHSNKYGIEAIKGISTSKTFIDTKANLDGVPLQSYKLVAPRYFAYVPDTSRRGDKVALAFNDSSCTYLISSIYCVFKVSVLDKLSPEYLYLFFLRPEFDRYARYNSWGSAREVFSWGNMCNTMIPLPTITEQQKVVNAWKAFREIKEQNEAKAAPLMQVCQSYIQELKHKYPLQEIGPYIEECDERNVDLSVRLSQGIANTKVFQAPKQVALNSKSDKIVRTGQFGYNRATTRNGEKISIAYRTGADCTVSSAYGVFKITNEDIIEPYFLWMWVSRPEFDRYARYMSKGSAHEFFEFDEMCRVKIPLPPIEIQRAIVNIYKCANEAKQIAEEADQLSREVCPALLQHVIHSMEKNKLQHHNITTDTLFDDIRNIIEQGRRQAYAAANQITVLTYWHIGRRIVEEEQHGEARAQYGTRLIKTLAEQLMPKYGNTFSKRNLDYFRQFYLCFNDLEIVNTRVHNLTWSHFRSIIQVADPKAREWYVKEASEQMWSVRTLNRNIGTQYYGRRMACVREGLALPSPDIEANDPLEYIKSPVVAEFLGFRKDSKYDESQLEQALIDHLQQFIMELGRGFAFVDRQKHISTDTGDFYIDLVFYNIKLKRYVLFELKTHPLTHADVGQLDMYVRMYDDLVKDENDNPTIGILLCTETDKVMAKYSVLNGSEQLFAAKYMAYMPTEEELSREIEQQKRFFLEQHGKEEMAKKQNKAVKEETLETILFNCRNSLRGRATMTDKRDLLLTLVFLKFIGERFKQQKEKIRHEIVEVQGIHDTDFIELQLSRPNQYMQDGVFFLTDETFWDKLILTSPTGMAIAFDTAIKTLDDNEPKLKNALPQQIFTKTALEPGVLKSVVDEINKIDPQKFNDHDLIGRVYEYFLQAFSINTDKEEGEFYTPHSIVELIASLIEPFDGTVYDPCCGSGGMFVQAAKFIEAHGGNTKAVNVYGQESEPATYRLAKMNLAIRGISYHLGDRAVSTFSDDQHKELKFDYIMANPPFNLKKYAEYGGFETDSRWQGYGVPPTSNANYAWILHILNKLNVSRGIAGFLLANGALDDSDTLEIRKLLIESDKVEAIIVLPRNMFYSTDISVTLWILNNNKKGGPWHGRQLRNRTGEILFIDLRTWNSNIYEKKYVRLTEADIDRVRQIYFNWQTENFVEYAEPELYYAAHRDEIQGKGYSLVPSRYIEFIDRDTEIDYQSALSEMSDKFNALKKRWDANETELVNAFKILGYGKEMEAVKLYKYLDFTGGLMMLHYSNLQFTNATQLNDPFDCHPSLIDFSNVPKEACGGWTPEIIEELRRDPFRRTREEVWICSLSKIYDSILMWSYYSKHKGICIGLDMEKAKKYLSIIQGTIMIGCSEVEVQYKDIVEKPNYFRDAEDFFRYQLSTKAKAWEHEQEVRLFILDPWPTYMSLLPDQNDEKGPIDWKEVRAFPEIGGECFESVYLGINMDTDEKSKIISVARKLNPDIKIYQMGIDANAFKLNTELIKMERKLLNRIKVVLAEKNRSNKWLSEQLDKDPAIISKWVTNTTQPNVETLIQISKVLGVTVDDLLRTEMATGNLIKKKEEFELWLKSQIAKGCDLLKREVSEDDTTIVRYRTIVKIKEYDEDEKNSFLADYKKWDSYNSELISRSFDDNDSPQSYYRVYGRTGDPTRLFGEDIIKEAKQQINEKVVCLESIMGQLPLIPQTAPNDNNDRSVKVNMGNKDVFIVHGHDSGLKNEVARFITDMGYNPIILHEQPNTGKTIIEKIEAFTNVCYAIVLYTPCDKGASKDCPNVQPRARQNVVFEHGYLIGKLGRERVCALIKEEVEKPGDVDGVVYVSYDGRGAWKKDIAKEFNTLGMHFNPNALLYMKRFVLLFFALAGFISSAAGQEQEITGFVYVSETPTPVPFASVWLCDPATGEPEYGTITAMNGWYDFDAPIMGLYTTILFIFQAAISRLFKNIAAKHSVMYFKIITGNNRIKSYHKKRKITMLISLKNYKDVNTKQFLIKFNNNYKYCKHNSTIYLFSMKNIKLFVTFVASLFFLFSCEKEKVETCGFDTIRLTESFLTEYAKGDGVDNYMIALASGPTVFDPTNQQWHTENDGWVMLISLFAEPVANLGAPEIPEGKYTLGSAPGAGVWSSEEDVNQLYYTGKDGVSTLVPVSGELTFAKTADGYIMTGKFLAADQKEYCVTYTGTLKFQPQGETSVIDQPVNTKFIGGQAIYKGPDPSFGDLGWVQLELYDAEPDPEMGTILGNFLKIKMFIPIQTEKFTSMPSGTWKLNASADENTAEPGYDSGEDLPTGSYVVQTSSDGSTMKLGMLNQGTITVTEDQHVVIDAYTTEGISVKGNLNKPLEILDLGGGEVDDSQYSTLTTDKVIDLSGAETAYFLDYEDYYENGTRNVVLQILDSQSMTGMFLDLALSKADNRYDPLPNCTCTLDPGDNRAFTFAGGSIWQSNAVGTWGFLKLQTNGETIMPDFSEAGNAAGGSLTITRNGDEYTITVNFIDDAETPHRITGTWTGTLTPYSYTASVSGLLEQSMKPVKMKKLFFAALIALAGFTACGTKNVETAATEATEQREVGGGDIAYVQVEAVLAQSDLYNAEGIALKDKTEKAQKSWAQKEQNFQYEVAQLQEKYQKGLITTNDAQSTQENIERRIASYQAAAQKEAKALDEENFVFSNRAQDLLHRAIENLNADGRYKLIVNANALLDADSTLDITPAVLQEVNRLYALEKKDKDKKMYEYLSGTISELAPTHAVLDVGGVGYFLQISLQTYSEIEHSDRVKLFVHYVVREDAQLLYGFASKAERELFRHLISVSGVGGNTARMILSTYSPRELQGIIATENAVLLKNVKGLGLKTAQKIIVELSGKMAGLGLTGDTVTAPVAGGDYEEALAALVMLGFGKAAADKVVKIVARENPGTSVEDLVRMSLKRLMFCKVIGAAGAILSLRQSIFLFGSFPDVSDGPNIRKVGLHIVLSMQNLPGFILRFPDRHRSDSPEVRKPGIIRIASPARQLHTPKPASPASALLNNTADRAILVFVQGMSKIRFHILLAALLVVTGCGEDDKVLPEQQQQFESFLSGSHQPRLVTEQEAMSSDEDLDFYSTFGRWSYRYIYHYYDSERQTRPEAEIGDEVDLVFWVYLFENRAITASTMPIYTNDRKWAEKLQEQGLDTKYWSFEPRPVRVGGGSFVEGVELSLPGCREKDTVEVYMTYNMAYGDALINFIPEQSPIAVFYTIDSVRKMGRWLPAILLFGLTTLCSCAEEPDNAYPGNTQNKALKAWMTQNRPDLLENYQEEGEYYVDVVSLGDLADSAILETESWVWYDITGRDLQGNISVARDSVYALQQGTFTPYTHYVPYYQFYGELASGTFKEGTYLAMRNPLKLGETYAAQKGFPREVELRVGAEVVLYMPATIISTEANGDGGYEGQYALSANHPMIARIKLVGRSSQPIETESVAVDDFAAANGGLDPTVPPQDDDSETASVKAGEPAPSYRWKIATSEAPQIYVNESFNPADDATGLFTYSNVYVGSQQKADEIDRKINKALVERFGTDEPGELIDPEKNVRVWYIARFLDGFVQSTNIDEVKRIVYGEVESTGTYMSYTPSLNKDKQILAWYYALPHFRYGSWGALLTVSSNAYGVVGITGTTQTSSSTNYAATYAMMNYYGMMNNYYGNNYMGNYYDDYYGSYMNGLYGGSVYNPYYVDNSTSTSTTITEVLPYTPLLIEFYIEPAQMDLEHFDCKTDSVGKLGVIDDFFNFLFRKILKLSEKDLIMIITFNELRRIKDRLPSGSSQRIADELGISVDSVRNYFGGRHPEAKEGVGIHIEQGPDGGVVTLDDTTILDAAMRILNEKMAKIIGIDLGTTNSCVAVMEGNEPIVIPNSEGHRTTPSIVAFTDNGERKVGDPAKRQAITNPKRTIFSIKRFMGETYDQVAQEVERAPYKVVRGDNNTPRVDIDGRQYSPQEISAIILQKMKKTAEDYLGQEVSEAVITVPAYFSDSQRQATKEAGEIAGLKVRRIINEPTAAALAYGLDKKGKDMKVAVFDLGGGTFDISILELGDGVFEVKSTNGDTHLGGDDFDHVLIDYMAEAFKAEHNVDLRKDPMAMQRLKEAAEKAKIELSSSTTTEINLPYIMPIDGIPQHLVMTLTRAKFEQLCDHLIHKTIEPCKVALRDAGLDAKQIDEVILVGGSTRIPAIQKVVEDFFGKVPSKGVNPDEVVAIGAAIQGGVLTGEVKDVLLLDVTPLSLGIETLGGVMTKLIEANTTIPTRKSEVFSTAADNQPSVEINVCQGERPLARDNKSIGRFHLDGIPAAPRGVPQIEVAFDIDANGILNVSAKDKGTGKEQKIRIEASSGLTEQEIQRMRDEAKANEAKDKEEKERIDKINAADSNIFATEKQLKEYGDKLPADKKAAIETALGKLKEAHKNADVAAIDTALAELNAAWQAASQDIYAAQQQQGGAQQGAPHADAGAGTNGQQQGGSNQPEDVEFEEVKMFLFRYPKRDFRNPNKRTKIEKIAGNKKGIDKKTLETIRFHRMQSKGVIKLLAILLAIACIYQLSFSLKARSVEKKAAEYAAKVSESDSLRQAAEIYYLDSVQNRPVYDLGFISFTYKEVKEKEINLGLDLKGGMNVMLEVQVEDVLKALAGDSAHDPMFEEAIARANKALKEGTNNYIGEFAKAYREVSGGAPLAALFVSPDRKDITPNSSDSEVEKILQEETDAAIDASFNILRSRIDHFGVTQPNIQRLPNSHRILVELPGVKEPERVRKLLQGTASLEFWTTYNNTELVRALEQADQLLRDELAAGATDAAVEETLTEEQPTAAGTEDTTESLIAEVQNNAPAAEEAASASGASRYTREENPLFSLLNPYDGGGAVVGSVAVADTATVAGYLRMDAVRELLPSDVRFEWGIKGEPQNNGRFSLYALKVSTPDGKAPLDGSVIVDARETYAERGAEAKVSMSMNSEGIQDWARLTGDNIGRCIAIVLDGYVYSAPVVRQKIEGGSSEISGNFTIQEAKDLANVLKSGKVPAPARIIQDTVVGPSLGQESINAGILSFVLAFVLVLLYMGLYYKTAGWLSDIALLCNVFLLLGVLVSFGAVLTLPGIAGIVLTMGMAVDANVIIYERIKEELRGGKGLSLAIKDGFSKAYSAIIDGNLTTIITGIVLFIFGNGPVQGFATTLIIGILTSLFCSIFITRLLIEGVVNKWGKISFSRKWSENLMGNAHFDFLGKSKISYIVMIVVLAVSCVSFAVRGLNMGAEFTGGRAYVIRFDRPVQAEEVRMKLQDVFSGYEDAANVSFEVKQYGNENQMRIVTQYKYDDTSDEATSEVDRILYDALHGLYGYPITFENFRNTQNDINGILTADKIGPSIAKDMTWGAIWSVLFSLIAIGLYISLRFKKWQYATGATTALAFNALVVIGVFSLCYGWLPFNLEVNQAFIAAILTIIGYTINDTVVVFDRIREYLVLYPKRDLRENVNNALNATLSRTINTSGTTLVTLLAILFFGGETIRGFIFALALGVVVGTLSTLFVATPIAYGLMKREGLGKKMERFGWLRRYVSPVFLALLVASFILWYIAKLNYTYTTEQPFTVNVDGERFKVSCVVEGVGTNLFGYRVYMSKRLRIPLSELKFRSVKAEDGEKFLKIDSLSLHNAISVRLSDIKVISVGSVPEIPDPRQQEKMIKVGITGGIGSGKSTVCRLFAACGAPVYDSDTQAKRLMEEDGPLRRRLAARFGEEIYAGGRLNRKLLAGRVFSDPAELSALNALVHPAVMEDFERWCGRQSGADYVVLESAILFEAGLEGYVDRTIAVTAPIDVRIARTCLRDGASAEEVRRRIAVQLDEEELRRRADYTLVNINLRELEYEVARLDKLLRDENRKHSAMAIVNVTPDSFFAGSRTPDAEAIERRVREAADAGCDLFDVGGYSSRPGAAEVTPEEEWRRVEAGVAAVRRIAPTLPVSVDTFRAEVARRVLETFGPVIVNDISAGEMDPAIVDVVAEYDAPYIAMHMRGTPATMQGMTSYRDVVEEVVSYFRLRAEQLRRCGVRRLIFDPGFGFAKTLEQNYDLLRGLHNLCSLGYPVLAGVSRKSMIYKVLDTTPDRALAGTIALGWECLRQGAAILRVHDVREAVDTVRIFKAFRPMIKATDIHKSYGALEVLRGVSLEVSRGEVVSIVGASGAGKTTLLQILGTLSKADRGSVEIDGQDVSSLGDRALSRFRNEKIGFVFQFHHLLPEFTAFENVCIPGLIGRRPKAEVERRAGELLALVGLTQRRDHKPGELSGGEQQRVAIARALVNSPAVLLADEPSGNLDTRNKEEVHRLFFDLRERLGQTIVLVTHDESLALRADRRIVMSDGLILPEMEFEPLRELLETLYDRYNRTEFIAPDPISVPHRFEGREDREIAGFLSATIAWGNRRAIVGNACRMMSYMDNAPADFVKNASEEELRKLTVCVHRTFNGEDLIAYVRALRSLFRRYGSLGEFFEGRYAATGSIPSVLSDFRREFFAEPHPIRSEKHLSSIDKGSACKRLNMFLRWMVRRDDRGVDFGLWRSIPMSALYLPLDLHSGDVARTLGLLVRRQNDWRAVEEVTAVLRTFDPEDPVRYDFALFGAGMDGFLKGMFRFKQFAVRQDRCPMKVGTDGVLLGAWAEVRPGDRRMLDVGTGTGLIALMLAQRSAAWITAVDIDVECATQAAENFAASPWADRLDAVSVAVQRYDPVEKFDLIVSNPPYYVDSLLSPDEGRNTARHAAGLPFGELAAAVVRLLSPGGRFALVLSPVEMQRFRSAALGRLYPVRWTEVCSTPRRGVRRILAEFCTTPVPAPEPARLIIELGGPDSYTEDYRRLTGDFYLKFMKRLLWMLPLLFAGMTAAAQNQDMARLGTYMSNGEFVVGTAETVLAADITVRCEKIVCGPYARYAQKFLGLRAPLTDKTVYTVADAAIALMPGERYVTAGELPASTCRVESYEAQGADFARLQTDRLDMTETDLQTAARNAAAAIFSLRKHRLDLISGEAGENVFGAGLPVALERLDRLEQEYLELFLGRRVVTTETRRFRVTPAEGKLQQIVCRFSPDAGLLPANDLTGDIVLLQYEPQGMAVDEAGVRPTSSTIPYRIAALTRCSLIAAGQEQAAQVLPVFQFGRTIALQVPRNRMDYTSRMAALLGRFRRERNGVVADTMQYRGKAYGLNYGVSLPTIRAVARAERPDSDFARFLYRQDVRELKLAAFWIADPVQVTSVEFSDWGEGIANSEMAEECAFALMSRSPRGDEWGRAWCDTGNELLGYAGLLALSRIPHPDFSSLVPVLRRLVVTYPESNLVAQGVVALLAAIMTNPAVQRQDIEIFLSSLGPGKTARYIEEEMTWRLEYMKDFDKIIGRNAITMIYFFTSQCVPCEAMEPVLDQFERRMAGRVDIYRINTDADENAYLLYRYMIRTTPTLIYFRKGDEIRRCEGPLTYQELLALQEQVETVEHVCLNMITHRGTIFGTSLKKEEFFEKQIRHLSFRKGFENRQKQKIPLKYERFRMAKVKKAFFCRNCGFEAPKWLGRCPSCGEWNTFTEEVIARESGGGPATVANLPKARPQRIADIHESEHRRIDLGNREVNRVLGGGLVPGSLVLLGGEPGIGKSTLSLQIALADNGLKTLYVSGEESAEQIKMRALRLGIGNEGCLIYAETLLENILAQIEEQRPDLVVIDSIQTIYTDIIESSAGSVSQIRECAASLLKYAKATGTSIFIIGHITKDGTIAGPKILEHIVDVVLQFEGDNNLIYRILRGIKNRFGATFEIGVFEMLDAGLREVDNPSEILLSHYETPLSGIAVGASVDGIRPYLIEVQALVSNAAYGTPQRTATGYDNKRMNMLLAVLEKRVGMKMFSKDVFLNFAGGFKVADPGLDLAVTAAVISSYYDRPIGEGICLAGEIGLSGEVRPAPRTEQRISEAARLGFRRIVVSGYLGRSIKKPKGIEIVTINSIDQLPRALFAEGMNETFEQCRKNLLRRGFEVRIAATTEEARQILREEIRATAPETISFGGSMTMEATGIVDELRREGRYRLFDGVDYTLPPEERIEIRRQGLLADLYISGINAITEEGALYWLDGIGNRVAAIAFGPRKVLLVAGRNKIVATRAAAEARIRDIAAPRNVARLGQKTPCAVTGVCADCDSEGRICNTHLRMERCFPRKRITVILIDEEMGLMNETLERCRRNLVRRGFEARIAATTEEARQILWEEIRAAAPETICFGDSMTMKATGIVDDLHRDGHYRLFDGFDPAMPRPQKLEIRRQGLLADLFITGINAVTEDGALLWLDMIGNRIAPIAFGPRKVLLVVGRNKITPTREAAEERIRTIAAPQNIARHPGFRTPCAVTGVCADCYSEDRICNTHLRMERCFPRKRITVVLIDEDLGLMDILIKIAQLFLCFTILVGIHELGHFLMARAFKIRVEKFYIFFDPWFSLFKFKRGDTEYGLGWLPLGGYVKIAGMIDESMDKEQMKQPVKPDEFRAKPAWQRLLVMVAGVMMNVLLAIVIYCAVCYTWGDSYFSNQDAKWGYNFNPTAHEMGFRDGDRFVSIDGEEIDNVMRVQNDLLITDGGRRVVVERGGEPVTLDIPFESLLRMRQEKAYEDLFTLRLPFIVDSVSYTSAVEAGLESGDEVVAIDDLRDADYPRYRDYLQKHKNDKVLLTVRRDGALIDSLALPVDAEGRIGVTVTNPYSLRTQYYTFWESIPAGIHKAGKTISSYWDQLKLIVQPKTKMYEELGGFVAIGSIFPGSWDWHDFWLKTAFLSIILAVMNLLPIPGLDGGHALFTLWEIITRRKPSEKFLEVAQYVGLMIILALLVYANGNDIYRFFIKMKQRIALLGSTGSIGIQTLDIVRENPGLFEITTLTAHRNWERLARQAVEFDADSVVIADERQYDALRQALDGTSIKVYAGEEALRQVVQSGQVDVVVNALVGYVGLMPTIAAVEAGKKVALANKETLVAGGCYVMPLAARHKAPIVPIDSEHSAIFQCLAGEKSPVRRLIVTCSGGAFRDRSREELAHVTVEQALKHPQWRMGDKITIDSATLVNKGFEVIEAHWLFGVPAERISVLIHPQSIVHSMVEFGDGAIKAQLGSPDMRTPIAYALSFPQRLDRPVAPFSFAEHPTLTFAEVDRIKYPALDLAYDCLRRGGTAGCTMNGANEVAVAAFLARRCGYLEIVRSIEYALGKSSFAAVPSLGDLGETNAEARCLAAEYLRLMNAFHSISSWWKRFSRKRRLSMLNATDNVEEWYTHISPAGLLAAFLAFALLLFILILSIVAYTPVLELLPGYRVEAARSRENLMQSVIRLDSMERMMNDMITYNNNIALIMEGKTPVVRTVGKEDSIRTNKTLVVPSREDSLLRAELEGEGPYSLGQSTGGGAARKPIEMVAPIEGIVIERFDIKRENFGIRIAASPDTQIVAADDGVVVMNLWTPETGYLIEIQHSNNLISIYKNLSKSLVAKGQRIKRGGVIGSNTEVLADGGDAKIFEFELWSNGKPVDPESYIVFMDRNPQGFLPVEKPGLSVSSFRSGISNGADGIPAFSRRKVELYKGNNKSLNLMPVSLPLYVSLKRVKTEYSMIKPTLLVLAAGMGSRYGSLKQMDGVGPGNEAIIDYSVYDAIRAGFGKVVFVIRHSFASDFQEVFTEERFGGRIRVEYVYQELDCLPEGFTVPEGRVKPWGTNHAILVARDAVHEPFAVINADDFYGAEAFRTIAEYLRGLDGASGRYCMVAYKLSRTLSENGTVSRGVCSVNAAGDLTGMVEHTQIERTAAGIVDHGANGDEPLAEDTPVSMNLFGFTPDYFAHSEAFFRSFLQESAGNLKAECYIPSMVNKLIADGTASVRVLRSPAQWFGVTYKEDKPLLVANLKKMIRAGIYPEYLWRMAVKGAIIAIDFDGTVVTHAYPHMGMDADAVPVLKELVANDCKLILYTMRSGQLLEKAVQWFKEQKIPLYAINENPGQKSWTSSPKVHADLYIDDSALGCPIRFMDGVARPVADWVKIRQQLVEAGYLDMTPNNINPNSANSDTKQEEHITFSVHDLIQTVIANWYWFVISVFVCVGCGYIYILRTPKIYSRTANILVKDSRKGGDTDLATLSDLAGLSQRRNVDNEIYILQSRRLMTEVVKQLGLTVQYETKDGLRPQDLYGQSPIAVEFINDNDRQGFRFEVSLRPDSIVKLNYFEIFGPDKQKFKQEISAVFGDTISTPVGQMIIRPTLYMSPDYYEKAPIRVTKGNLGVVTQFYQHEVKSFVANKQASIITISMKSSVPKKAEDVINTLIAVYEKDAIDDKRGIAESTGQFIDNRLEIISEELSEVDRNIEKFKKDNKIYDIVSEAEQTITESAQYKTDGLSLENQIRMTEFLKEYLLDPTKTNELIPGTLSINSPAINSQIEGYNTELQRYMKLNSESSENNPIIQNLGNGLASTRRSIIATLDSYISTLQIQLAALRKEEALTNQRISSVPTQEKQILDIVRQQKIKEELYLYLLNKREENAITMVITESNSRTIDSAYGSPRPVSPNTVLIAGIAFLFGLGIPFLIIYLIQILDTTIRGRKDIEDNLSAPFLGDIPQYSGEKQQGSFVVRENGRDPVSEAFRMIRSNMNFMNLGKGEIKVIMITSSNPHAGKTFVSTNLAMTFATTGKKVVIMDLDLRHRTLSKQMGHGGDTNGISSYLSGNTELQAIIRKSKLSENLDIIYAGIQPPNPSEMLLSQRMEELTAELKLRYNYIIIDSTPAMAVADAIITDRLADLSIYVVREGLLDRRQLPDIERLYREKKFHNMAIILNGASSTKRHGYGYGYGYGYGYGLDEEETTTKKGFWGKLCEWTRNKFQKKMKRIKAFALLLGVVVLASCASQKRVIYLQDTQADEQIKIAQDYQIRIKPLDRLTVVVNSRDPELAAPFNTSTSLNSLTGTPLSTYSSNSASLQIRTVDENGDLDMPIIGPIQCKGKTRSELAQEIADKIREGGYISDPTVNIQFADMKISVIGEVARPGQYDITNDRISLLDALSLAGDLTIYGVRSDVKVIREENGVRTTASLDLTSQDIYDSPYFYLQQNDVIYVKPNKYRAQAGEISQNRSFYISLVSTAVSVATLIVTLTRMNGKGFCLLYLRLLYFITLKETIDYMMNAVWSRNAVLYEMNLRQTTSEGTLAAAAERLGFLRDLGIDAVWLMPHYPIGKVGRKGSLGSYYSIRDYRAVNPEFGTMADFDAFVRRAHALGMKVLIDWVANHTSRDARWLAECPSDWYERDASGRPVVPDGWDDTAKLDYTNRAVWQGQIDAMRFWLAEHGVDGFRCDMAMLVPIEFWQEAARRLRAVKPDLFLLAEAEEDYLFDRAFDASYAWRLYHLMNDVAQQKCRVDRIREYLYADREHVPTWALRLMFTSNHDENSWSGSEFARLGPAVRVMTALTFLLPQSLPLVYTGQEFGYDHSFAFFDRDPLPACEPNETTEFYRRLIALRHDAPALASGERGGSFVEIRNNAEDCLLTFVRETPENRVVALLNVSPYEVHADFDTGIYAGGYADALTGERVQLCSHVDERMPGWSFRILTRPMMKKIILTIFCFGMLFPLLGSAARPYGVEEIPNVQVGNRYRFTSNPDGVLSPSAVAEIDSLCYSLRHRALAQVAVVAVEDIRGDDLFSFAHTLFSQWGVGRADSDNGLGILLVVDRREVRFVTGPGLEGVLPDALCKRIQMRYMLPYFREGDYSAGMVAGLRAVASVLEGSELDSGGNDDFRAADDLPVWAVFLIVFLVVLVPLGIMLVGFYHSRRCPRCRAFALVLQSRNLVGQTDHYNLFEDTYRCGKCGFVVKRQSRSARSDNNNHRGGGGMWIGGFGGGHGSGGGFGGGFGGGSFGGGGAGSRWMKKVIWIVVVVLVVLFISGSCSAYNRMVTAEETVNTTWADVEAQYQRRSDLIPNLVNTVKGYAAHEQSTFTEVVEARAQAMSFKLDAADLTPEKLAEFQQAQQKVGSALGRLIAVAEQYPDLKANQNFLELQAQLEGTENRIAVARTRFNDATRQYNVTIRRFPANLIAGMFGFDQKAYFAAEEGAQTVPEVKFMCRGRKWDFAGPPKASAVVRTLFCRKEVLIKISGIAVKIPDKFLYFCSLNYHGMLSVLFYLFLFVICTFFLVLSAVALLLTWPFDKSRRIVHELSRILVRIFYAVPPLWKFRVTGREYIDRRKPYVIVVNHQAGLDIPTLYFVPLNFRWVSKREVFKVPFFGQFLLLHGDICINRGHATAAMEKVIRDGKLWLSRGASVAIFPEGTRSHDGEIYRFKAGAFTLAREAGVEILPVVLDGTTTMIGRNGMFNWRNKLTVSILPPVSAERVAAADPKELMEQVRASMCVRLAEIRKQKMFDKKIDNTSNSYGDDAIVTLSPREHIRLRPGMYIGKLGDGSQADDGIYVLIKEVVDNSVDEFIMGAGKQIDVTVEDDIVTVRDYGRGIPLKSLAAAVSEMNTGGKYGGSAFKKTVGLNGVGVKAVNMLSSEFTARSVRDGEARTVTFAQGLEQSDRWESGVQEKNGTFISFRVDREVFGDYSYNLEYVEQMIRNYTYLNLGLTFRFNGQSYVSKNGLLDLLGENMTEEPLYAPIHLSGEDIEVAIAHGTGYGESYYSFVNGQYTSQGGTHQAAFREAIAKTIKEFYHKDYDPSDIRTSIIAAISVRVTDPVFESQTKIKLGSKEIEPGVPLRNFIVDFLAKHLDDYLHKHSETAQILQKKIVENEKERKAISGIQKKARETAKKVSLNNKKLRDCKIHLTDKNELAEESMIFITEGNSASGSITKSRDVRTQAVFSLRGKPLNCFGLTKKVVYENEEFNLLQAALNIEEDMDNLRYNKVVIATDADVDGMHIRLLLMTFFLQFFPDVIRGGHLYVLQTPLFRVRNKKETHYCYSEEEKNRAVARCGANAEITRFKGLGEISPDEFRGFIGQDIRLDKVRLTKDDPIHDMLEFYMGKNTYERQGFIIGNLRIEEDIVESDLAIGMSEQREDMTERDDLPGEVLAAADDAARSVGAEESAAPTGKYGKLLSEEGGVRKLTGMYRNWFLDYASYVILERAVPHVQDGLKPVQRRILHAMKAVDDGRYNKVANIVGQTMQYHPHGDASIKDALVQLGQKDLLIDCQGNWGNILTGDEAAAGRYIEARLSKFALDVVFNKKTTEWMRSYDGRNEEPVTLPVKFPLLLAQGADGIAVGLASKILPHNFIELINAAIAHLQGRDFVLYPDFPTAGMIDVSRYNDGLRGGTVKVRARISKIDKRTLAITEIPYTTTTESIKDSIVKANEKGKIKIRKVDDNTAEKVEIIVQVAPDESSDKTIDALYAFTDCEVSIAPNACVICDDKPHFLGVSEILRRSAEHTRELLKMELEIRLNELNEAWHAASLERIFIVNKLYQLIEGCKTREEAYAAVGKGLEPFTKVLRRAVTTEDIQRLTELKFIRISRYDSDKADNEIRQIEEDIAQTQHHLAHLTDYTIAYYERIRDKYGKGRERRTELREFDSIEATKVAVTNAKLYVDRVEGFFGIGKSMKDSEFVCDCSDIDDVIVFTKDGRYVITKVSDKAFFDKNIYYIGVFKRNDERTIYNVLYRDGKNGPILMKRCAIKGITRDKEYNITKGDPKSEILYMSVNPNGEAEVLKIYFKPRPRLKKVIVDLDFSTVAIKGRQSQGNLFSRYGIHKIVLKERGTSTLGGQQIWYDEDVHRLNTDGRGVLLGEFQGDDKLIVRTAKNVYYTTNFDITQHFPDDTVHVSKYSPDTVYAVAYFDRSQNYYYLKRFTAEQGEKMQSFLDEDADLVAVTSCPGAVLVLTFQGAQASRPAEEIDVDGFVGVKSHRAKGKRLTTYDVATLAFVEPERPERPEPSGEDAPNGSEGDFDLPETMTVEGTDAEFEIERPKGDTEEVIVDTEQLNLFMIVFLVGYMGCGKTTIGRRLARRLGYDFADTDDRIEKQEGADVCDIFHYAGEEYFRKAERGMLEQLIASGDDLVVSTGGGLPVWADNMVRMNGAGLTVYIRRSAEQIAARLSPHGRWKRPKLRGLDDRELVEFMSRNMAEREPFYGQAALTIDGGAMSDDEILEFITEKLKERNGMDNRPVGVYDSGLGGLTVWREIRRQLPEESLVYLGDGKNCPYGARPADEICRLADEAVGRLVGAGCKMVVVACNTATAAAIDFLRRKYRQMPIVGMEPAVKPACLNTRSGVVGVLATARSLDGDLFRRTAARYGENIRVLTAVGEGFVELVEEDREQSPEAVETVRRVLEPMIREGADQIVLGCTHYPFLLPVFRQVIGERGVAVVDPSPAVGRRVGQLLDQYDLRAEKGATANYGFLTFADEAYRSRLECKAFGMATKKNSSAKSPQATSRSNRDSMRWILGLLLLFAGLFLTASVLFYYFDWRADMSLVSGVEQEDPRLADLSDAIENPCGYAGAWLAERLVGRSFGLFGIILPLIVTMVGVRIIRQRPLLFNHSVLGALLILILGSLTLGFAFGEKWAVFGSGWGGAFGVEVARRLTSVIGVLGNIILLLGAWILTGVFINRNFINTVNTAGNAMVDKGGKIVDLVKQSVVNVADHRSKSGEEKTDPEPEPDSKPESERPQPEPVPAPVDASARTSAADGAAEVTIQRPAPVAAPVPDEPDESPFLEIPLTEEVPATVAEPAPSRSAGPRIVGGDDVFTEVDLSGGEADAAFTAPREPEQPQYASEPAPVVDGITEYTLTAEPEIPAEGVVVTVEAREAKVVDEKSIESSLYDPLKDLNNYQRPPVTLLEDYTSDSQVSDEEIYENKSKIEQTLKDFGIPIQRIKATVGPTVTLYEIVQAQGVKISKIQGLENDIAQSLKALGIRIIAPIPGKGTIGIEVPNRDKQVVSMYSAVRSLRFQESKAELPVVIGRTIQNENYVFDLAKMPHLLVAGATGQGKSVGLNAIITSLLYKKHPSQLKFVMIDPKMVEFSLYSKIEKHFLAKMESEDEAIVTDPRKAVYTLNSLCTEMDNRLELCKMAGARNIAEYNDKFTARRLNPEKGHRYLPYIVVVVDEFADLIMTAREVEGPVMRLAQKARAIGIHLIIATQRPDVKVITGGIKANFPARIAFRVMQMIDSRTIIDQPGANQLIGRGDMLFSKDGELIRIQCALVETREVERIVDFIGRQQGYSEAYRLPDYVPESSGGESSSLGSESGAPVRYDTLFADIARAAVSQGQISTSSIQRNYEVGFNRAGRIMMQLERAGIVGRQEGAKPRDILFHDLPSLEARLQELGVFMNWIVLFIAGVFEVAMTFCLGKTKGAQGTELYLWIGGFVLATVLSMGLLAKAVQTLPIGTAYAIWTGVGALGTVLLGIFVFGESAGFARIFFIVTLFGSIVGLKLVSHMVETFVMSIVVFRIFEFDRCRSGFGVHLQIRPMYSGENRRNDDGSVYRSIIGKNILMLAALFAVFSVQADNRPQAVLKQLTAALGALEGYSVVFEVHTDGDVVPGYYEVSGDNYYMHVNGQEVYGDAEFRYEIDPDRKEVVIDRVDLTSHNLLNNPTRAFDFIDGEYAASLLSEKGSTAVIRLTPLRIQSAVGQIDVEVDTARSLPTAVIYEIDGDRVRIDIRSVTVHEASPRTFDAENYAGYEWIDFRMSFSLRFLCPAWPERIPRRPSPVENIELYPLFSTFGLLLRPIENSGLTFFVLFARSDESIRRFPLIENIRKYILMLTEEEKNAGLEGKIIPINIEEQMKSAYIDYSMSVIVSRALPDVRDGLKPVHRRILYDMSAELNLYSDKPTRKSARIVGDVLGKFHPHGDSSVYEAMVRMAQDWSMRYPLVDGQGNFGSMDGDSPAAMRYTEARMQKITDEVMADIDKDTIDWTLNFDDTIPEPTVLPTKIPLLLVNGASGIAVGMATNMAPHNLGEVIDACCAFVDNPEIACEELLKYVKGPDFPTGGIIYGYEGVREALLTGRGRVVMRARTEIEHTASGRECIVITEIPYMVNKAEMIKKIADLINEKKIEGISYINDESDRNGMRIIVILKHDAVASVVLNTLYKNTPLQTSFAVNNIALVNGRPMMLNLLDLVQHFVEHRHDVIVRRTRFDLAKAEKRLHIVLGLLIAQDNIDEIIHIIRAAKNPDLAKQAMMERFSLSDAQASAIIEMRLRALTGLEHDKLVAERNELEAQIAYFNDVLGSRELQMKIVKDELLEVKAKYGDERRSEIVYASEEFNPEDFYADDEMVITISHLGYIKRTPLAEYRTQNRGGVGAKGSATRDEDFIEHIYMATMHNTMLFFTEKGRCYWLKVYEIPEGTRSSKGRAIQNVIQIEPDDKVRAYINVKRLDDAEYVNNNYIIMCTKDGTIKKTKLEAYSRPRQNGVNAIVIREGDQLIEAKLTSGSAEVMIAAREGKAIRFNENTVRPIGRVGAGVRGISLDEGDEVVGMICIEPNSSQDVLVLSENGYGKRTDLDEYRITNRGGKGVKTINITEKTGKLISIQAVTDENDLMIINRSGLTIRTAVDQIRVAGRATQGVRIINLREGDAIASVIAVPANEEEEPAVLDGAGAPESESEENVSKEQMKKLILALAAVALLGTAAQAQKINKEALLQKIEKNETASADAKKGAKAATWLNLGKSYVEAILAPTKDLYVGELGLQLDMTFGSPKSIDEVTINGMSVAAQNYDYLTVYVSNGQVIGWKEIEPVKEGAIDKAIAALNKAYELDSKQGPKVKEQLMAISNYCSQLGDACNNIGEYKLGSEAFETAFRAEMSPACGTPDASRLYYAGYLAAAAGEKDAAEYARGVELLNKALEMGYTDDNGMIYYYLFHNYYGQREADRANVLKAKDALMTGITKFPKNQDILKSLIMLYSMEEGLGDSSELVTMLDDAIAGDPQNIELWFSRAQIFVSLEDYDEAIASLEKAIELNPQSYEAQFFTGYYIIMKADALNQEANEKEYTNAGEYEADQKEILSIYSQAVPYLEVAHEIMPQNPDPVQLLKTLCYRLRDEPGMMEKYEKYNELYKQMMNREILRLAAPNIISNITVPLMGIVSSAVAGHLDNSAATIGALAIGVSIFNFIYWNCSFVRMGTSGLTAQAFGAGNFHECTNMLVRGILVAAILGLLVICFQNPLGRLALWAMNGNEIVHDYFYARIWAVPAGIMLFGFNGWYTGMQNAVIPMCIAVTVNIVHVSTSLWLVFGHGMGITGIAYGSVVAQNTGVLLAVLLLILRYRKILTRFTWREVVDWEPVRKFFLINRDIIVRTLCIVAVYTFFTAASARMEDPILLTVNTLLLQIFTLFSYMNDGFAYAAEALTGRFIGARDEQSLRRCLGRCLGWGTLISVLFVGIYLIWWRDLLGIFIKAGTPDAAQVVSTAGNYIVWIILIPLASAMPFIMDGIMVGATETKVMRNSMLLSTVAYFGIFYSLYPVIGNNALWLAFTLYMFLRGTLQLLMTRRLRLIYRKAAAMARYFDRISAGIILFFRKIAAVGAVIPKIRLPLLPAPVFSAGAECRGFPCYAGEIEMKDFKNDSDTTLARFGRDKRARISSAERIERRPRLQRDAADSEHSSDSRPRASYNPNFTSDNRPVREDRAHRDDSRRFGNRSFGSDDRRRNDAADREFKPRFSERKDGYASRPYEDNKPGGFKKFGKPYGEQKEGRDRSFGDRKSGGYSRSDKPYGERRYDDRKQDGYKTFDKPYGERRSDDRKSGGFRGGDRSFGRRDDKFRSYPRYNPNKPTGEIRLNRFIAQSGICSRREADDFIQAGLVTVNGVVVTTLGTKVQPTDEVKFNDSRVEGEKKVYLVLNKPKGYVTSLDDPHADKTVMELVKDACTERIYPVGRLDKNSVGLLLFTNDGDLTRQLTHPSFQKKKIYQVSLDKPLTKADMEQIAQGITLEDGEIYADEIAYVKEDKTEVGIEIHSGRNRIVRRIFEHLGYAVKKLDRVYYAGLSKKNLKRGQWRFLTREEVQRLKSGQYEMNAIDRNILHNSRVLVFIQPQRGLSMVLELYYTPRNDDYVPGAQFSYEHCKVDTLRRWADADFNSMDRGTITEVISYMAEQAPARRYGLILGGHGLGWVPDGTSVNAIRFSAFQDFWSPMPNALPTRWMGDSGKRAEIPQLAAAFGNTGLHFDYLLFDACFMSSIEALYDLRGCADRIIASPCEVMAAGFNYTDILPHLLADAGTSYDLPGVCSEYYDYYMNRATTKSGCIALTVTGELEPLAAIVKEIETKYPGKTYDRASLQTYEGLDEHVFYDLQGYIEAICDEKDPLLDKFRAQMGKAFPTESRLHTPSFYSVYGLGDAPNGMHTIEDGKYSGVTTSAPCERFAPEWAQTSWYRATHMKKLHHIVLVLALAATLFTGCNKDEGVTPRPPVPETADQTIMFYLTGTNLGSYFRKMSMTRMRKLLVLLLFLPLMATAKIPVEEDIIRQTLDSESPYYYPNLMLRYQSGDDSMTEEDYHYLYYGYAYQDAYKPLNANSDMDKAILIAQTVDFENPTHESLEKLIAAVNDALVQDPFSPKLLNLLAFAYGALGDSKNEQINYNRMNSILATIEDSGNGLKEGSAWHILMFGHALDLLAAHDRHYGKARVVSRSVEYVPLLEPVRTEEGRIKGYYFDYSRIYRNKPDDYVFKRPRTWQFNNLRPREYKMQIRRQRPRTAANGFEKQDEASEAFKDIIIKYNIINDMTRHKLSGAGAAIPTPFTPDGRVDYPALARTIDYIIDGGVDFIVALGTTAETPTLYLHERAVVAMFIKNHIAGRVPLVIGVGGNSTSEVLDQLREFDLRGADAILSVTPYYNKPSQEGLYQHFKTVSEHSPLPIILYNVPGRTGVNMTAATTIRIAGDFPNVIGIKEASGKIDQIQEILDWRSRDFLVLSGDDALTLDLMSRGADGVISVAVNAFPRKMMTCIDLAKKGDFEGAHKAYECLEEAVTALFAEGNPTGVKCAMSVLGLIGNTLRLPLVPGTPQLEARFKELIAKYDLNMHPVSLEFPFRKESETARPEPGERRSEKGVRSYYSDFLHHYFRCQGMRPKMIREKIEKLRRTLDYHNHKYYVENSPEISDREFDIMMRELQELEAAHPEYADPNSPTARVGSDLTTEFQSVEHRFPMLSLGNTYSLDELHEFIGRIEKELGQTEFVCELKFDGTAISLTYEHGALLRAVTRGDGTRGDDVTANIRTIRTIPLHLQGGDYPDFFEIRGEVLMPYASFDRLNREREENGEPLLANPRNAAAGTLKQQSSAVVAQRGLDCTLYQLAGDDLPCTTHWECMRKASEWGFNVSDKMRICRSQAEIDDYIAFWDEERRKLPFATDGVVIKVNSYALRRELGFTAKAPRWAVAFKFKAEQALTRLESVDFQVGRTGAITPVANLDPVQLAGTTVKRATLHNAEQIALLDIRVGDMVYVEKGGEIIPKITGVDLAARPADSRPFQYITRCPECGTPLVKYEGESKHYCPNQSHCRPQILGRIIHFIRRKAMDIEGLGEETVELLFENGLLHDIADLYDLRAEQLACLPRLGEKSAENIIRSIRGSVEVPFQRVLFALGIRFVGETTAKYLAAHFRTLDAVMHATREELIEADEVGGKIADAIIDYFADAENLRIIERLRKAGLQTEAAHKALESESLAGKNFVITGRFSGHSRDELKELIEAHGGKNLAAVSANVDFLVAGEKIGPAKLQKATKLGVRLISEEELLAMIASGGTLPVTENASDGNTSATPPSARETTDKTDGGNTEQGSLFMCGKTAKNKKNAKKNSTLIPIAKFCLYLHKIFRRFRFAETAKPEKGRRRTKENDGMANSTTPKKRLVASFRNLPSELQEAIKQKYPLGFSEAMMRIDKPNGEFFYAVPFETDEINYLVKIDVKIDDRADDDEDKDYYDDDIKGADDLQDDDNSGDDEDRDDMMTFGSDERGSTLAGAKDGGKVDLSAPPAEPNVSGRPDMENDRMNPFIRKIGFGVLLATLFLPLHSCGLGEDSRDEDNRYVYLRFADPAFEAYCLEHWDLNGDGRISRYEAQRVWDMDCSSLGVKTLAGIEEFTALRKLDCSGNEIVALDVRKCIFMEQLNCSGNALISLDIKGLRFLNRLDCSNNDLTYINLATNAALENLWCGGNRFASLDISHCATDMIRVDTVPNESLSVLYKRAGQRILNLNVDGGTKVEDLMNKVDVILGLQWGDEGKGKVVDVLTPRYQAVARFQGGPNAGHTLEFNGEKYVLRSIPSGIFQGGKTNIIGNGVVLDPILFREEATALAKSGHDLKGRLQISKKAHLILPTHRMLDAAQEAAKGSARIGTTGKGIGPTYTDKVSRTGMRVGDVLGPEFRAVYDRVKARHEATLRSLGYVYDIAELERQWFDAVEYLKEFRLIDSEYEINRLLAEGQPVLAEGAQGTLLDIDFGSYPFVTSSNTVCAGACTGLGIAPSRIGEVFGIFKAYCTRVGAGPFPTELFDETGARLRDLGHEYGAVTGRERRCGWLDMVALKYAIMIDGVTQLIMMKSDVMNDFDTIRVATAYEIGGERTDRFPYAVDAPIVPVYKEFKGWKCDLRKFRRYEDFPAEFKAYVEFIEWETGVPVRIVSVGPDRDETIVRMKKQLKIVVLAKQVPDTRNVGKDAMTPEGTVNRAALPAIFNPEDLNALEAALFLKDETEGSTVHILTMGPPRAADIIRDAIFRGADGGYLLTDRKFAGSDTLATSYALSCALRKIQPDVIVAGRQAIDGDTAQVGPQVAEKLGLPQVTYAEEILEIKDKSLVIKRRLEHGTEVVECPIPAVVTVNASAAECRPKNARRVMKFKNAMTASEIAAEPTSEAAKMAASKPYLQIFEWSAADVDPDDNQLGLTGSPTKVKKIENVVFQAKEAKKLTADDKQIEELMVELIASHTLGMNNVFVYIELENGVPADVSLELLTKGRELATTLGVKLEAVVLGHNLGDIAKELAKYGADTVWTADDKEFAPFRTLPHTAVMCGLIEQEKPQIALFGATSIGRDFAPRVSSALFSGLTADCTQLVIGDHKDAKTGTEYKNLLYQIRPAFGGNIIATIVNPDHRPQMATVREGVMRKEYAATPGAGEVKPIDWKKFLKESDLVVKILDRQIEERKINIKGASVVVAGGYGVGSKENFKLIHELAEVLGGEVGASRAAVDAGFTEHARQIGQTGVTIRPKLYIACGISGQIQHTAGMDQSSMIISINTDPDAPINKIADFAITGDLNEVIPKMIKYYKQNSKMANFFLDNKDLQFHLQHPLMRKIVALKERNYTLKDHHELAPQNFEDAMDNYRRVLEIAGEVCGEVIAPNAEGVDHEGPRVENDHVVYAEGTARNIDAITKAGLSGMTLPYEYDGLNFPLVCFVVANEMVARGDAGFENIWGLQDCAETLNEFASEELKRMFLPRVSAGETCAMDLTEPDAGSDLGAVMLKATYDEKSGRWLLNGVKRFITNGDGHISLVLARTEEGTSDARGLSMLVHDKRDGGVKVRRIENKLGIKGSPTCELVFTNAPARLVGDRKMGLIKYVMSLMNAARLGIGAQSVGLCEAAYREALKYAQERAQFGKPIIQFAAVAEMLSNMKAKLQGARALLYETTRFVEIYKQYGHIAQERSLEPEERQEMKFYNRLADGFTPLVKLFASEYANQLAYDAVQIHGGSGFMKDYPCERLYRDARIMNIYEGTSQLQVVAAINAVTKGTFLEQIKTYEAADYAPEMCAVKSKLTDLRVRFEEMVARVETLEKECSGYKDFHARRLVETAGHIIITYLLARQAGESAEYIDSARIYCKLAESKVAEAYNYLMHSDVEDVDLFKKVGQEEAIGMLKKVLLMAAVVLLGLPGLAHAQLGRGEISVGYGVAPVTDWIDAYSDKLLDVLDMKDASMDSWGGVSVNYTFRIVGGLGVGATFVYSGNNQRLAGKKISTDYYSIMPHLKMRWLNLRILSLYSRIGVGLTFTESSGEGQSESARQWAFQVSPIGVEIGGKVAAYAEAGIGTMGSLVAGLRFRFMQTNSQIRQSSLAAMKGNWGSAILLYVVSCVLYVPYGILNRGGAIAGLAVLLLIFVYLPINFGLLRTFLAFARDKRPLTIEGLFCAFNNTYYWKAIGTGLLSGIYTFLWTLLLIVPGIIKGLSYAMALYIVSDNPEIGCDEAIERSMAMMRGHKMRLFLMQLGMIGWSLLSLLTLGIAMLWIVPYYQTVFANFYLEIKAEYEAAGNAAMNINARFEEIINSLYKGNKRAFAQSVGISATVVENVVGTRKGKPSYDVLEKVCANANISAEWLLTGKGEMQRAEDRQLAIPAIKEQFSLRTDRTIGMQSVPLYELDATAGLVALFDGTTRQVPVSHLQIPDLPPCDGALYVRGDSMYPLLKSGDIILYKEIPHATSSILWGEMYLLSFTLDGEDYITIKYIQKADDDRFVRLVSHNPHHSPKDIPADSIQALALVKASVRFNTMGMKEEMKKWQTQSNKNKVCFYLITRGIAFSYTEKSGIVFEASASFVKRMSDALVTAYGCSLRPSINEVKMMKYIELSTSKKARICRALGVSRVTLWSALTFQTQSTLAEKIRRMAVQNGGRVMIKLDVTEGFMPNCEIDFVHDIGGVQRIIQTFSNGVRVEFDNATCTASISRDNRAVKTFSDVKVRDWGNIVFEAQSLTDSLNRMLPADLYIHFICPSEQLMFRTRESMSPQLRRLDVRYRTDKSYPPECYRFELSIPAVEEYTMTFRVWIDKHDPRIGQILTVAHDVAESVSTEIRLEIERMEYFGNIIAVTMHELTQSDDGEAVMSRSAYDHLVTRGRVNVLRPGKGLGSYALIEYHSLPERFRLRFEAKYGNPEKIMKQEDMPLAVDSEAQKYYHEYLLPNGEHLPEDKQTEYTLNARVLNALREMRGTQKAMRRACNNNTPVIWSNIFATAEELRQAYGHTLPKSEARLRDKLRQYTKEGYACLVSGKFCNANTLKITKAAGRQIVALRRCRVPVYTTKQLFEEFNRIAERRGWKRLASQSSLVQYLERPEIKPLWYDAVYGELAAKQLYARRNKTEMPTMRDSLWYGDGTKLNLFYKAVENGKTVVRSASVYEVIDAYSETLLGYAVSDTENFDAQFRAFRMAIETAGHKPYEIVTDNQGGQRSKIAQKFFANICRINRPTAPYNAPSKSIESVFGRFQKQVLHEDWRFTGGNITSKEAWKINREFLEANKEKLFTYEEMLEAYSVARSKWNAMKHYQTGIAHEEMYRTSVNPATERVTELDMIDLFWLTTERPSIFTADGITIQYQNRKYTYEVLTSDGTPDYAWRSENTGREFFVRFDPKSMNRALLYEQTPMGLRYETVAYPYLTVRRNIQEQQEGDMELIRYNDEANKRERVRRQIEAHTLELEHGVAPEQHGLRTPAIKGISEKEYERLADTVVVVPSEQYSEPVTVGEYTKAVSNLDCDPTAIFNRMMKQLSLEEKKDIQARLQVYVSKYPSQNKAVNSLGISAGTISTILNGKFDNISDEMFLRIRSQISPVNPEEWTVCETTAYRELFLLLEDAQANQNVSWVVGNAGIGKTTTAHDYAAKHENVFVISCSEDMRRGDFIREMARVIGLKLAQTSLREKLQAVTDELRVLDRPLLVFDEGDKLMDTVFYYFISIYNALEGRCGIIFLSTEYIKRRMSIGLEYDKKGYDEMFSRIGRRFIDLTPATSHEVTAVCLANGLNAEAAISSVLADARTVVSKAANPWDKKQVRDYYDMRRVRKSVHKSKKLAEIKKMGRTLSAKQVLTIKRRTIRLGGIWDDCVGEIDRTGVVFFWGNSGNGKTSAVVSFCKALCAHGKVLYLPLEEGLGGTTQDAIRRYRADECGSRFQYNDSMSFEEMDERLSKPRSWDFVVIDSFQYTQMSYKEYIAFKERHRNKLLIFVSHADGKRPDGRAAIKVMYDASLKIWVEGYKAFSKGRFIGPTGECTIYEEGARKYWGMDIKKIYISGKITGLPVQEAIAKFRSAAEKIRRFGFEPVSPFDNGLPLEADWAEHIGKDISLLLRCDAIYLLDDYEKSEGARIELCIALHRRMPVFMNVRPKLGFFSVQTFEDYDKEKAMTKKKRSYFRFYAIAKAKGIDLDRYKETLVLQFTDGRTSSLREMMSTEYEDMCECLQSGKMRGESIADHKERLRKARSAVLKRMQRLGIDTTDSSFTPVNEFCMDLRIAGKPFGLLTVEELQSLIPKLEAILRKPKIRNTQCAVSIPLIIRSNQLPSMKPVIKTISEVKDAKEHLEDQISCLLMQFEKDNGIHISDLSVYPREIYNEYGKITDRQIGTSIVVKLMLARGPRPEDERYVPLAVRMLTLVGCLNYAMLDLESELTASGLFRHETKRRYTQAQTLVLQAHGIAWSMLRKIDDRAARQYNDKTDEAYRTISGCILLEAPQRSYNIVLSLCRIISSLNGRISGRYDFNPAKPLVRIPALLECTGIEDCKIDGIIELNLTDMKVIVTFSGGKDSLAALLWVREHITTNFTTVFCDTGWEHPLTYEYINRIADKLHLDLVTLKSHKYDGMVDLARQKKRWASTRARFCTVELKTKPTIDYVLDEVQDNMLMIQGIRGAESPARAKMSAQCTYFKYYFEPYSYDKNGKPKKHSYRGKDVRAFREKFADDLLRPVFDWSAQQVIDYILAAGLEPNPLYTMGYKRVGCWPCVMANQRDILNIAQQSPERIAEIANFERELHSSFFGPDKIPSYAITSGNKYHNIHDVVRYVQWQNATGSLFDDDTATSCMSFYGLCEMKKYTQADFDAFEVIDGIKQCPSGDYSDIRVFGKRCSFGNRCSFGERCSFGRGCSFGEXXXXXXXXXXXXXXXXXXXXXXXXXXXXXXXXXXXXXXXXXXXXXXXXFGRGCSFGNRCSFGRGCSFGECCSFGEWCSFGRGCSFGEWCSFGEGCSFGRGCSFEDKGEYIGDYPFLAFVGFGSRIGSKVYFFNLQDGIYVRCGCWLSDIAWFRERVKAKNTDAMYLDLCDLVERKFNRKNMRANEYQTRAMSTRLPSCENATYMLFGLMRSPEQVLKALNKHGKVSDYKFERLYRILFNEEMFHVAYQRIYAKPGNMTPGTDGKTINRMSLQRINKVIASLRDESYKPNPAKRIYIPKKNGKKRPLGIPSFEDKLVQEVVRMILEAVYEEVFANTSHGFRPNRSCHTALTHIQKTFTGTKWFVEGDIKGFFDNIDHNVLIATLRKRIADDRFLRLIRKLLNAGYIEDWKFHNTNKGTPQGGNISPILANIYLDNFDKYMEEYALRFNKGKERHITKEYKQLSDKMQRILKSIKNIQDADVRLQLRDEYEKLRRERQKIESRDSMDETYRRLRYVRYADDFLIGVIGSKAECVKIKSDITKYMEENLKLELSQEKTLITNAQKPAKFLGFDVSVRKSDAIKRDKNNVPARYYNGKIVLKVAIETVRNKLEEYSAIRYKVENGRQVWFAKFRGNLMKKKIEDIVAAYNSEIRGFYNYYCIANNVAYALSKFGYIMEYSMYHTIAGKTNSTVSKVIDKYKVGNDIIVPYQDAKGKLRYRKFYNEGFKRKPPMYYTEVNDLSYTIAIPQPTLTERLDARTCELCGKVGPVVMRHVRKLNQLKGKTECDRLMLEKHRKTLVVCEKCYAKIHSHAKAEEDVQAQIEQVKMDVDYIASDSSLTPSDKQQVANEWVRIQGEYWSIMANAEKYDVPTDSFTVYFQRLKDYLTPLLADMSTTSEITGTEFRKVFSDYYEISSNMSDLIDDAIDESIKSTEYLKQAIEGGSEEKGGLYLLSMILLRNRQGEVTAGVSGLQEDDVPFWSGADYTNRKKAVFRVHADGEVHATKGTVGILQVKNDSVEVSDATASGNKIILTTNNINSVSQVLGSSKVPKINYWTMCKQLKKVMAECGIEKQISYHCGRHTFGTLALSKGMPIESVSRVLGHTNIVTTQIYAKITTQKLDNDLSMFGNKLNASFGSVTPMKRSIITTDGNGNITLPTDIGATAMSEWELCDLFGVTAPTFRAGLKALCKSGVLREYGIRRSIRVSDNCSMEVYNLEAIVALAFHIGTFRAEQVRNAVLERLYLRKEKTSIFFSLNTNGISKSEYFSMRQETGCANGKTPEKRMSDYAFREKKSERLSFCRTDLMNYMSAIEQQDSHRPPSDGGMAKEEFIRVGTMLYKIVEQPRLNGGYVKKRIAWNNETLRQDYGKDYIGSVPKYDGFCTVPEHIGYRSVVGKFLNLYEPIDHVPRQGDFPSIRSLLHHIFGEQYELGMDYLQLLYLQPIQKLPILLLVSEERNTGKSTFLNFLKALFQNNVTFNTNEDFRSQFNSDWAGKLLIVVDEVLLNRREDSERLKNLSTTLSYKVEAKGKDRDEIAFFAKFVLCSNNEYLPVIIDAGETRYWVRKIDRLQSDDTDFLQKLKAEIPAFLHFLQYRQLSTDKESRMWFNPTLLHTEALQKIIRSNRNRLEIEMHELVLDIMDSVGTDTFSFCYSDILLLLVHSQVKVEKHQVRKVLQECWKLTPAPNGLTYTTYQFNCNRECRYEPIRRVGRFYTVTREQLESLMRDHRHPFVDFSFGEWFVEKMLRGYEAVYKYITLTIHQINKFSSTSKPYVIMTIQDVKQIKLADYLQSLGYTPVKQQGRNLWYKSPLREETDASFKVNTELEKWYDFGIGKGGNIIALAAELYRSEDVAYLLKRIEEQTAYIRPASFSFGRQHSDNQPYQGLRVGELSSPALIAYLQERGINIGLAKRECRELRFMNADKPYFAIGFPNMAGGYEVRNRYFKGCVAPKDITHIRQQDGQRCMCYLFEGFMDYLSFLTIRVRNNPQHPRLDTQDYVILNSVSNLAKAESLLETYTQIGCFLDNDTAGRSTCKKLKEKFGERMLDKSMYYRDYKDLNDYLCGKPLSQSAEPIKEKKQVQSARRMMQPPKKKGGFHLMGYFSLDIKKAKGTSDTTQSDHIERKIIPKNADPTRTHLNRVLVEYPDGVHGRDEAIAHRLNTAGIRRKITHDQVRVVRVVLSGTHEDMMNIQEKGKLDEWCNDSIQWLQATFGKDNVVAAHLHMDEKTPHIHAAVVPIVTGERRKAKKEQTDGKRKYRKKTNSVRLCADDLFNRQTLIAYHDNYARVMTKYGLQRGVRGSEARHTTTMQYYRDLKKKNETLETETRLLQEKKAEAQEELKQVKAEIRTDKLKSAATDTATALASSVGSLFGSGRMKSLERRNEDLQDRILELEDEARQRERQQAEQIQEIRNAYEQQHRKLSEFTDFVRRYFPYVEKLMPVINFLRDRLGFNDGIIRRLCEFKEVGIKGELYSSEFNRSFDTRHSVCSIRQDENGRFDFKIDGVSHVNWFRKKMNEFREAIGIPKPRQNRSMKLMQFENFLRFQILDAHNASFLSNMFWKELPQSDTKVRKIRDLPFKHHGFFMDSEKKWGCIGYALLALITWGLTQGFKVVCIIIGILIAILIAFIFISNLSTKRLIKKFKHQKDIYPNAYSFFRKELRIFQSENNLTKQDINKFLSFPKVEWEKREKLELERIQREKQVSTEYNMIKANYSDGLTCWQKEHPSANKSIIISNITEIIDFDRRQKEFLSTEEWEKAQIAFSKLCRSKKSTTPHSGCYFYNMNFQKTDYKGNIIQGEYRIWQFFFSSFCTATDLDYTHFKQTQENNINIDKYKEGKINTPSYINIEISNFIKSLGVPVQVIAYGAEFDENLQVQFLTLDLAVLGFQSCALHHIDELSSNYVVIIDGVTTQDLFVKRCESVIQKFKHQKPCIVYISLMKEFSREEMQKLIDKKNIEVQQQKQIKDEINSISNALKSADIETAKEKVKKVKDFALSKSVDKELIDVICKTEKKIESDYAVGVVDDFDVQYVDYLMPSVVQDKSNWKYPVTKYPEDGCIVFPYRRKAIARRGFSEAKFQNYLQDTFRGCDLLILGDCNILPVEDNRPFEPDIAIICKKHPSIRIDIEIDEPYAAFTRKPIHYIGCGDDFRDALLNNIGWIVIRFTEYQVFSNPKGCAAFIAQVLHYIQPSMVLPIDFLSCSTPKEIERWTEIEAKVMASENTREKYLNHEFGIVDNEKLEIADITQTEKERVCAKRMKPLVFSSNRKVNYKIGEPVFCEKDVHIQFYPQEHIYLYDGQEQFIPVSSVISCFFKPFDSYYWSEYKANQRNISQGQILEEWDSKGACSRDVGTFMHQQIENYYKGLPYQQEFSFKYDGKYVHIEEQISLELEYMQFIEFLENHKFKPFRTEWAIYDDELKIAGTIDMIHKRGDVFDIYDWKRSHRIVDFWGKPIAVNNYGEKGLGELNQIEDTPYWHYCIQQNLYRYILERNYDIIIEKMYLVVFCDDTNEYRKLEVPRMDEVIISIVKSCKNGTVKKRLITLQGENLSMEDNYYIKTLLEKIESADPKSFSQFAHEHPICFQEKKGNWLFPMMFDFYVNKIHNEYIISLLKELGLYLHNKCKNYEMSEITMIDRSLCIDDSFVDNYVLKVQNAQNDKPKFKDLNSPWRTRGISLALYEIPTFVLNSIIFEFKDTEHPYILADIAGMYMYGQKFEEGLNYLYRSINQLAMFPNRYWNSDYGLAGAANTFRLLLLMCPKNHMELYRKIYSYDYLYLTKLACTTNDEIFQQEAYVNRASIAMDSMARYIIPININPDLLYISDMYYAHYCNELATQISISSGWKYNMKSLTYYQHASIKPNDTGGYVDIEEKTYNEIVSAKHEQAKSIALLFYTGICAEDGKLTSRNIESLFKILQYECRYNYKETRKRVLNFKSYKMDFFEFLFGKKEDKNVSSQSSSSVNNCKSESTIKSVLQSEAPSMDPIEQYVKESVTDLKKHMPLNTKDLEAEAIYLAAYLYLKGSYQIDFELDYFSEGLIDKIPSRNFNVADKVFSYMVKYGEGHYGVEERDYGINGYKMNIQMCSDYGSYVKSYFIRAHKIGSGQDYNHFSSPRNCLWRNGEKTIDSPTQRDIYYKFSKGTFEFMIPPYNPLVVGRVTKQDESTLRCESNDGRRTFVFHFNGALKPSCLDYIEMYRNDKGDMVSYHKEMGKDKLRRFAENLTFECFVQPAFEEAFRRDHPLKGHWHSDFFHNDRPIVLELGCGKGEYTVALAERDPGRNFIGIDIKGARMWRGAKTATERQMRNVGFLRTRIEMIASFFAEGEVDEIWITFPDPQLKSRRAKKRLTSPLFLGQYAQILVPGGRINLKTDSQHLYAYTQAVIERFGLPCDVANNDIYGSGFADEILSVKTAYEQMFLERKLPITYTRFSLGERRDFPPFDWEGDDTDEKDNEEARKNDISDRTSRSSYANPMYLRSIIAIAGMLVTSCLSPHQTVVTDTGGGTWSESAEIEIPNADTVTPRDLYIVVRYNDSFRGDTLRLTIRTISPDSLVFEESYTLGLPPRRHPAALAEEASVPYRRHVIFPDSGIYRMVFTPATPVRGVEAIGINQQKSEMDNTKPYTKAPKPEIGRGCTFYYAPEGVAAKPCEGCYKLHETAWLEQYPQHTPTDIFEVRFKNTRRSYYQNVNNLPLERGDIVAVEASPGHDIGIVSLTGDMVARQMRRVGFNPYNGEFKKIYRKAKPYDIERWQEAIALEHETMITARQIAAEMGLNMKIGDVEYQGDKIKAIFYYIADERVDFRELIKVFAERFHIRIEMKQIGARQEAGRIGGIGACGRELCCASWISNFSSVTTNSARMQEISLNPQKLAGQCSKLKCCLAYEYDTYVDARKEFPRLREPLQALDGEYYLVKTDILAGTMSFSSSKDTMTNVVTLPVARVKEIIALNRAGKKVDQLSAEQPQREKFEEPTYRSEEDSITRFDGNGSKRKGRNRRRSDRAEERENRNNGARSGSAAEAAAVSESRKDEKQENAANRSERREKRDRRERNNRNGQGEGRESRNPRNSDRNGPRNGQSTQKNEQRTERGNTSGEQNGERGNGQGSRSEQRGERRSERSRSENRPGQNGSETDPTPTHSQSPGEEGQNGARRRPRGRGGRNRREGNRQEGGNGETAQPEPPKKEQMYRFSTYKRQYKANLKLALPVVMTQLGQILVQVADNVMVGRYGGDDPTPLAATSFGGSVFFILFIAGVGIALGLTPLIGELYAQGDRCKSSQYLQNGLMFYTLLGFLVCGLQLAVIPLMYHMGQPVEVVDMAIPYYKLLAYSMPFIMLFFTFKQFLEGVGNTRVEMVVVILCNLMNVGLNWIFIYGHLGFEELGATGAGLGTLGSRIAMPIMIIGYFYKKQKYRAYLQGFSPRNYSVKTIRTLLRMGLPISLQMFLEASAFVGTSIMMGWLSKTAISANQIAMTLGNCAFMIVTSIGAATTIRISHCYGARSLKELTLAAKASYHLVIAWNLFAAITFISLCNVIPTFFTTNAEVIDLASKLILLIAVYQLADGIQNVSVGILRGIQDVKIIMPIAFLSYIVFNLPVGYLLGFTLGMGAQGLILGFTVGLTTAAVLLIVRYRRDIRRWKAGIRMSKACGTDIYGAVPGFDANASLPGGLFGVIPYVGPGLLSVLENRLVEGVGEAMQAKISKTLEAIIARTAFETSKRAITHSLKDFLTLEILREEGSLAHQILTSRLKDWEIHQICLRIESEIRSVSAPDSSRQNPEEFFPLYTRELQRLFAPMHHVSTAHALLHIVSDPHTITSQVLAMYHFDAQAIATELQKMTLEADQTTPPDTNFRPTPELRFIGLREPVRDTPPAEPALLDKFGTDLTYEARRGRIDPVVGREREMERIVQILSRRKKNNPILIGEAGVGKSAIVEGLALRMAADEVPATIRGKRLYSLDVSSLLAGTKYRGEFEERMQRLLEELRRKQDSILFIDEIHTIAGAGSTQGSLDTANILKPALARGELQVIGATTLDEYREDIESDPALERRFQKILVEPASEEETLQILHNIAPHYERHHGVRYSDEALRACVALTGRYITDRNFPDKAIDVLDEAGARIHLQDKGKTEKPSRKTASREPVGAAAGAKTPKNRSRKTAAADTTTVGGAVWTLPSDPGPPEIRAEHIEQVITSMTGIPAERLSGSESERLRGLADYLSARVIGQCEAVEKISRSIQRSRAGLKDEGRPIGVFMFVGPTGVGKTLLAKELSKWLFDENKGLIRIDMSEYSEKHNVARLIGSPPGYVGYGEGGQLTEAVRRHPYSVVLFDEIEKAHPEVFNTLLQIFDEGHLTDGSGRKVDFRNTVIILTSNVGSRAAAIRSTQVGYSTCSKSDTQQKAPQSEYRRALEETFAPEFLNRIDDIVIFRTLDLSDVERIIDLELKGLLSRTDRLGYKVEITDEAKRTLAAIGYQRKYGVRALRRTLLERIEEPLSGLIIDGKLHSGERVIVEPDGEKEVILRVAMFGKANAVALSSLVENVRFVLLKLQTYNEEIPGNIMLNKNIAYMKRIGLISDTHGTFDQTLKTFLKDVDEIWHAGDIGSPEVADQIAAFKPLRAVYGNIDGGIMRRTYREFLSFECEGVSVLMTHIGGYPRHYTPQAVARIQSLRPKIFIAGHSHILKVIYDPVYDLLHLNPGAAGCYGFHKVRSALRFTIDGTDIRDMEIGEWPRPGAMLKTGAILNFLIAAGHLACLPWLYPVLSIYRIDGIMETLALRYGAAIPYLLTVAIAFIFAVFGLYGLSGAGVIRRLPLLETGIYTIATLFLLRAVAGVAEMAVTGCAPLADSTATLAAAVVGTLYLLGGRRKFGRQKSEMPSGIPEADCRTALKIRSDDIPYFTPANGSDTSDQNMPTNGKRAQRAIPESMSDKKMLSMSIPLAERLRPHTLDEYIGQAHLVGQNGVFRKFLETGNVPSFILWGPPGVGKTTLAKIVATALKRPFYTLSAVTSGVKEVREVLESARKQKFFDSKPPILFIDEIHRFNKSQQDSLLGAVEQGVVTLIGATTENPSFEVISPLLSRCQVYILQPMTDGELQTLLDRALATDPELKTREIEVQETEALFRFSGGDARKLLNILDIITGAADGKVTITNQYVTDCLQQNIALYDKNGEQHYDVISAFIKSVRGSDPNAAIYYLARMLAGGEEPRFIARRLVILASEDIGLANPNALLLANACFDTVHKIGMPEARITLAETTIYLATSPKSNSAYMAINQALSFVEHDTTNRPVPLHLRNAPTKLMDQAGYGKGYKYAHDYGGFAELEFMPETLKGKKFYEPNTRNAAEAKIAACIRELWKDKYKMKHDVETKSGQDTISPLRIPEPDGSGSTHPLFRTAFSPAVAENKNFQYIMDNITKQNGNEVGRHQVEGQTIIINQQERRSTNGLGTAGFILALLGLIFSWVPGLGWVLWALGLIFSFVGIFRTPRGLAIAGLVISCIALIVLIILVSAIASLVMKKEYPVQKDTLSCIAMLETLISPVFQFRYSLSNGERSLMLITVYTCGTAATGDKVRAWVTVLLLLALMGNSYRSMRRKERERHDKLRKMYRTHTCGQLRAANVNETVTLAGWVQKVRNLGAMTFIDLRDRYGITQIVVEEHSPADVKTVADGLGREYVLQVEGRVVERSSKNPKMPTGDIEVVASKLVVLHEAEVPPFTIEENSDGGDDLRMKYRYLDLRRPPLQRNMILRHKMAQEIRRFLSDEGFLEIETPYLVNSTPEGARDFVVPSRMSPNQFYALPQSPQTLKQLLMVAGYDKYFQIVRCFRDEDLRADRQPEFTQIDCEMSFVEQEDVLEIFERWAKHMFREVMGIELTEPLRRMPWIEAMEKYGSDKPDLRFGMEFADLTDLAQGHGFAVFDDAEYVTGFAATGCAGYTRKQIDALTEFVKRQQIGAKGLVWIRVEADGNVKSSVDKFYSPEQVRAMAERAGAKAGDLVLILCGKKFKTLTQLCALRLEVAQQLGLRDPKKFAPLWVIDFPLFEWDDETQRYYAVHHPFTSPKLEDVQYLDSDPGRVRANAYDFVCNGTEIGGGSIRIHDSKLQAKMFELLGFTAEQAQERFGFLMNAFKYGAPPHGGLAFGFDRLCSLFGGSESIRDYIAFPKNNNGRDMMLDAPGYIDQAQLDELHIQLVKPEEMEQTRPFFYKGLISFVKKVGNGNEIPAVKRDKKRRDAEFSAKLLILPKNRNDGTAATRMEQQQPDEKFMRLALNEAEKALEEQEVPIGAVVVADGRIVGRGHNLVETLADATAHAEMQALTAAASTVGGKYLSECTLYVTVEPCIMCAGAIAWSQVGRVVYGADDPKRGYRRYSEQVFPPRTTVTRGVLAEECERLVRSFFAALRRMESAEKKLNLHSLLSGRSFDGWLRPTERGDISDGFAGNGDKNGRNLFMKKLLISALALFVVGSVAAQEGLGETYNKAVAAYNSKDFASAATAFETLIDQGLDSEDLDVQSWVATAKKSVPVCYFQMGLTAAKGNDFNTAVENLTKSANKAALYGELQQERMSNMLMAKIYLMWGGKPFNEKNYAEAAEIFAKGYAADPKNMEMANFLGICYCELGDFQKGLVIFNEIASQDNPKYAEDVVKVKENIKLYTNNRIAKLQGENDFDGIIAVADEMLAVNLQDALAQKIRLQALFDKKDYAGVIASAEEAAAVQTDEEERSDVYFILGAAYNARTMPQQAIDALSKVTAGANVAAAQKTVAQLKENAAKANSMSAGCSGNLPYERTGKPEPDRPAHRHRPDLRHKGSRSSMISGQYIKKLAENAGFDLCGITPCKHLAENESYFREWLAKGYGSSLEYLERNLDKRFDVRHLVEGAQTVVVCAVSYKNPLGEGYPPGCRTKIASYARSRDYHPVLKRMLGTMLEALRRQYPGLTGRTFVDTAPLLEKQLAVEAGLGWIGRQSLLLTPQYGSYVLLGELVLTLPSDQYDAPFAGARCGRCRNCLDSCPTGAIVAPKVIDTNRCISCRTIEKESDSALPDLDGWIFGCDRCQSCCPHNQKAPMHRSPHFDPLFDPLTISDREWLAMSEEEFLLLFGNTPLARSGLRRIQQNVRINQEKNEEMTIHTLYELVQHSVKSFASKVAFAMYGGEELSYAEVGTRVKHVQDLLIGAGLKAGDKVALLSSNMPNWCVSYLAVTSAGMVAVPILPDFSTEELEMIIAHSEAKALMVSDKLFAKLAKSTIESLHIVIRTKNLGVIASRPAAEKGAVGIPNPEDLAVIIYTSGTTSRPKGVMLSHANLCAQISMSAAIFPIFPDDTFLSVLPLAHTYECSIGMIYPFSMGARVVYLDRPPTASVLMPTLAEVRPSVMLIVPLIIEKIYRHQILAKFTSSGFWRALYKIDFMRRYLHRVAGKKLMKVFGGRLRFLGIGGAKLDGGAEKFLLEARFPYAIGYGLTETAPLLAGAAPSQVRLGSTGPAAPGVELRLENVNPETRQGEIVAKTPSAMIGYYKNPDATKEVFTEDGWFRTGDLGEFSADGWLYIKGRLKNMIVGPSGENIYPEDIESVLNSHVCVADSVVTEHEGRLVALVHFNTDALEAKFDGWKEDFENWKENLKKEVVDYVNSKVNRFSRISEVVEEKQEFVKTPTQKIRRFLYTKRNPHQKHEMSKRMIREKSVLPTANNPYNEIGKDPCVFSDFILPTPSASATLKVEIAKFTLQEIPLPGKPDNAKRRCAVQIGIRKTDAPVKPRPLHIPPEATDTNEHTEPKQRHPVRTAPTQTQLSSIGKSGRAPAKGNDREATRPSEKRFRRKPKSAPESMNSYKRWNNIVGWIVFAIAAMTYLLTMEPSSSLWDCSEFIATSYKLEVGHPPGAPLFMLLARLATILAPSTYYVPHMVNAMNCLASAFCILFLFWTITHLARRILTRQGAELTKANIVAVLGTGAVGALAYTFTDTFWFSAIEGEVYALSSMFTALVVWLMLKWEEQADQPHSMRWIVLIAYLMGLSIGVHILNLLTVPALVFIYYFRKTQRITFKGIAVSTLISGAILVFINSIIIPHTVYIGALFDLFFVNSLGLPVNSGLVFFVVALLGALGMGVYFTHKKGRTVLNLVLLSTLMILIGYSSYASVTIRAAANPPMNSNNPSNPFALYSLLNRDQYGDKPLLYGPQFSAPTSGYKYKDVRYLDDDGKYKTVSIISGYEHPDEFMHLFPRMWNYAASKESYKSWSAYRTRTDYERDENGEIVRDAQGRPNKIEVLDFGHRTLWDDGSGYEPLVIVEPTFRENLNYFFTYQLNHMYWRYFLWNFVGRQSDIQPTDAIITDGNWLSGIKWIDELYLGPQDNLPDEIANNKGRNTYYFLPFLLGLIGLIYQLNRDPRNFSIVMWLFVMMGIALVVYFNTSPNEPRERDYVYAGSFYAFCIWIGLGVLAVRDLIVWATRRKGLMAPVAATVVCMVVPGILAAQNWDDHDRSHRTIARDIGWNYLQSVLPNAIVINYGDNDTFPLWFNQEVDGVRPDVRIVNTSYLGAEWYIDELKTKANDAPGIPFTLPRSKYTYTNDMLPIENIVDRPLELKEAIDFIRNEDPRTKLVLSNGSKIDYLPSNRFALPVNKDNAIASGIVKEADRDLMVDTIYMELPKRAIDKSEMMLLDMLAHFDWKRPIHFTQVYTLQSLGLLDYLQFDGYTYRLVPIYTPCRNVQEIGRVDPDYVTPLLTETFRYGNLSDPRTYADHTIQHTLSASKARESFARAAKEYVFRGDSTQAIRLLDMGLEKLPPQQIRYTDANTLPFIEGYYMAGAPDKGDGLLMSYARNLMQYIDYYLDFQGIQGDMVTQTLIDKMQSLDRLYYLAAYMGRQDVLAQLNDYYRTLGIYENELIHPDLSTPSDSVQIPEMKAGCKIDFAGFCRNGFPVLCKDSESREKTGTSSRFSEADPIFCKDIKITLKSGVYFCFLFGFFIIVGKVWGAAGRNPGIMKHFRFAWMLLMFGGGILGCLPSCSDKDNGMEQTEPNDPDDPQGPQIPDDPNPPMTGYIAHTMTEGELMYYGHDSEYSKEGGAVYFLYLKDLNNSARGCSVCFYVNVPRQEKGSFTLPAGKYTASSTWEINTFNNKNTTRYRSNWNVVAPKWTQYVAEAGEFEVAIGDNMTYTIRGHMKGGSIQDGGSIMENEAGVAFAFTGRLLISDYSEDYEDPDDPDTPDDPAPEVPEVTMSTGSLYRYNDNIYYLQLKDANPADLYETTFYLKLPASDSPLLASGDYMAATTGEEMTIDASKSFWNFTDKDNHNDKIKNRLKEGTKIHIVSNGDHNYTITGTLEGTSDKTGKNTALKINFSGTLPFEDYADPEPVEPTVAEVTMTIGNLDYYDGNIYTLTLKDANPTDTYEASLSFKLPASETLQLVSGDYPVSTGSGEMTLDAAKSSWTFIDKENFNDRIKNTIKEGSLTVTNNGNHNYTVTGTLRGASDTGQETAIKIDFTGTVPFNNYSTPPAPEAPKATMTVGDLYYNGDNVFFLGLKDGSPIKEYGITFYITLAPTDPLQLASGDYTGGAAGENMTFDLAKSFWNYNDPTYGIIKNRITEGTLKIVANGNDDYTITGSFKAIDEDDKNTELEIEYTGKLPCEDYSYMTTATVEITPIATPLLKTTIQEKSIRPAPYEKFPISPDIQSGLIFLTTDRRLSRPSPHLKISFQTSSNEIVPIFQPIKTHNKLKKTKTFANTEYFIYFFPTKKNNISITNVTKNETAEKREAIIEVSYADIQPAPSFKVKQTFPNAQPEIVFAKESLDVPAEGGPFQIEYTIENPVANATLSAKCNDSWITDIDTKTSGVISFNVTKNETAEKREAIIEVSYADIQPAPSFTAKQAARPEEAFTITISDITTKTFRTTVRPGDQEMYYLLNIIPSRAAADFKTDDELYQYDIDFYTDMDATGSGWQSWAQEYLEQGTIADRLIENMEPDTEYLVYAYGVDPITIERLTPISKKTLTTLAPQTIDTKFDIQIVSTEGLNIDVLVKANDYDGHFVAKIYGSVDAADTDATVLEKISESWIDNVQIYGWMGYTAEMILSQYTFQQSREIQETLEPNSKYYIYAFAVDDEALRCSDIVFIPITTNDTSIQHMARSTFKVLFYVNGSKEKDGIVPIMGRVTINGTVAQFSCKQTIPKTLWDAKGNRAKGKSAEARNVNLALDNIKAQIIKHYQRISDREAYVTAEMVRNAYQGVGSEYETLIKAFDKDCANFLKRVGKDRSIGTYKVMVRARNYVAAFIKSFYRRTDMSMLELTPDFIKEFAAYLTAERGLKNATIWLNCMWLKGVVMRAHYNGLIPRNPFAQFHISPNVKEREYLTEDEIKRIMAHEFDNPTLALVRDLFIFACFTALSFVDMKELTTDEIVEVNGEKWILSKRHKTNVPFQVKLLDIPLQIIERYKYLSEDRLVFGKINYWTMCKQLKKVMAECGIEKQISYTPEAGWKQGKLYDPATGQFQKEFDIEQIDQTATEAQDTANSADRKAQQAKDYIDNTLPGELSEINKRLDGVVENWFYPYTPSLYNEPAQTWIADGEQENHIGDTFTNTLPANFDPTDAGCWEQGSIGASYIDGIKTWDQIKIADSTRIRLKTPVGGIPKGAVLSVGEGYTMGYNPIASSGAVIASYVWSQSYTVGSDNPYIAFVIRKTDNAKITPAEYPQIHFTISSDKTTNPDAGKSWRWVKEEDGTYKWTPIADSDAVKALQEAARAQDTADAKRRVFVVTPTTPYDVGDIWTQGEGGDIMRCIESRATGNFESSDWDKASKYTDDTAANEAKDEIANLQFGARNYIAKQFIREWNSAKEGVSDVVTTGTDTDGAYMRIDANKASNAGVAIASTSQIVNWTDCFGGKIAYKAGMSYVFKARIKQPNSKRGVMFCAVYDDNTYQFMSAPPSPTASELYEAVYTTQAGKSLQKIVLYVVAWNPIYLYDVQLTEGNKAPAGYLVAEEDVKFGARNYIAKQFIREWNSVKEGVTDVVTSGADADGTYLYVNWSKLLQAGLAATNIPQASTVPDCFGGQIKYKPNTPYVFKARIKQGAEMTFRVRYEDGTTETLSAPPAGTEGVYEVVRTIDASRVVQKIYMNIRDGVSMYLYDIQLTEGDKAPTGYITAEEDVQAQIEQVKMDVDYIASDSSLTAEEDVQAQIEQVKMDVDYIASDSSLTPSDKQQVANEWVRIQGEYWSIMANAEKYDVPTDSFTVYFQALEDYLTPLLADMSTTSEITGTEFRKVFSDYYEISSNMSDLIDDAIDESIKSTEYLKKAMEDGSTEVKGGLIMTNVMLLKNAEGDVTAGVSGLQEDDVPFWSGADYTNRKKAVFRVHADGEVHATKGTVGILQVKNNSVEVSDAAASGNKIILTTNNINSVSQVLGSSKVPQVRFGGRYGKTYCRKAVRRSVPSLRLGEGGSIIDLVMRLERCDFAHAVRLLRNRERVPIAAPRSLSPLSTVPALRILSDTPLRHSALLDYLRRRGIVPEVACTYCREIRYTINGRKYFAIGFPNDAGGWELRSECFKGSASPKQITTIDNRTDTVIAFEGFMDFLSCLSTKHPDQLRIDVIVLNSVVNLPKALPFLARHSTIHAFFDNDDAGRKATAELIRLCPRSEVVDQSCFYSGHKDVNDYLIAHIKDHAKKLAAQKNASKTKTVQSVRNNPQLLKAKTAAVEPQRRKGVKVMGKPCQLIQVASYAFELGYEIQMLATQAFSYRSCPKQLSDDFRRTLPRSTGQMIGKIIAGSSFAGTVGYVMKELSRILDAEGVNPPEVKNIIEDFKDQTRLNPRLKNTVGHISFSFSPKEAPHMTDALMTQIAKEYMQKMGITDTQYLLVRHLDQPHSHCHLVYNRVGNKGQTISDKNIKIRNTKVCRELTEKYGLHLAPGKDSVRRERLREPDKTKYEIYDAIKGCLPKCKSWNDLEGRLKEQGIDVRYKYCGNTDRKQGVLFSKNDFEFSGSKIDRQFSFSKLNLHFAYAQQQTRHRSAIVKDFHAAAGSYRSAFSDLFGTGGGKTDTDRPTVNFGGNIGELPLPPNSSPVELSEAQLQRKPGENPEEYLARITALLNTVAEAMAIAAMERERRLRERMTKPKQKLMSYEMYEDFKETMVKTIKTELAAKTANNNQSSDNDLSQRLEQIVYTEQERHQAIIIQLAGRLESIEQNYTKTQTGIDNLQASVEAIKIPAELPPRIIRHRVIFSSESPFVIYLVLFLFISCMILSSALYFATRPNRDRIDNDLKYRYIKMKGDATPERITELEELFELNRDNAKIRQMKKDVETFEKIARQKAVHDEQVRLNEQAAKYFEQQLKKIKADMILDYIEQAGKGKYQCFKTKKICLDSVDNDTIAYNYDDKTIANATKSTFAETDHSRVKTVSIAYLFKSPKVPPPIFQYFLDGSRHTFKIDDIGIGKKIFPIIAGQIIVGCCKRKDRDTFKCWQLNNKIVMAMPDDYDDDDGGENFCRSFCETINSKVIDKISKLKDLQLGINKLLLYRTNINPQEQGRDNYKHRGIACIQNEMTDEEQLMVERLCKVGKLHNESWLIKDGSLEYNPSFSNLNRTQWDNLRSNYQHVVGVSKLFDPELLPDFEGNRLSKTIANLGPYERTKVYRYESDHKGGKSYFAVWYVRLRNHDFRETHFSDIVKCEMVLMDENDKLETDKVDMISANLIREAYPVCYGVDTRWANHLYPIFLTESFCKSKYVDSNIILNLFMLQVIGKVSATEKMPSTIDNFYFWTDKGQILSPFDIVKVEHVSSNSDKSITYGVIEEITHVTDAASHFTNFISSNFGDTADSIGQMNRLGMNYVKAKVVCNTDDIYTPVLDGKQVSLCDEEDIRTALGLNDVKNPLVCGYLEMYQGNAAKKVKVELNSHFLIGPDGAHLNISGISGLAAKTSYSMFLLNAIQHKFKDIDGSSVAFVFFNVKGRDLMAIDETNTELPEKDKKIYADLGLSIEPFKNVRYYYPYTKDEIMQHAQSYAHPQDVERQKKNHKAFTYKFTYDKSQDKLDLLLANEDDSTGTLESCVNYVINGEGYFAGVNNWKDFQDKLDEYTKTAANGGVKNEIQVTSWRKFKRCVSKAIKNDIFSKVIHDNVGEVDLTSEIQHNLTANQVMVIDIARLDENSQSFVFGSVARAIYEMKLGADRDNIPDKIILFVDELNKYASNDIPKNSPILRQLLEITERGRSLGIILFSVEQFRSAIHDRVKGNCSTHAYGRTNAIEISKADYKYVPKVYQNMMTRLSPGEYIISNPALRSIVNIRFPRPTYKQFPNGMAELKTHKSRIGKGLINMLMFQMYGDEKLIYREYVQNARDAINDAVNHGILGAITDGRISITIDSAKRFIEIRDNGIGIPVERVESVLLDIADSNKDGESSAGQFGIGRLVGGYFCKKLSFRTTYKGEEFASEIVFDIDKIKAILNDENDKRDATDVIDSASSRNLYDENKDDHYFIVTLCNIDLQYPALLNKDIIADYLREVAPVDYSAQFRNQLIMTSVSGEYEELQKNVGYFPISINGTAIEKRYGLRVVGTNDTINGLEYFSLKDDTYGLLAWGWYALTDFTKAIPVSDTSSQFRLRKHNIQVGEADMLTTYFPRNETRGNKYFYGEIHIANQKIKLNSARDGLAPTPEAECLKCLIRNFFDGLVKLYHLANDTKKAVERYIDAYKIIQAPATENIVNAQKQLTDACKKLKSITKSKNATNPVAQKVLESYKRRIKDLHTEMDQEIPCIPASELPISSPIPQVEPELDDFEILNNHYPEDLAALIRRVCMSYQRNCPVSHIKLIRELQRKAIRELIEEMARPRKKLKILLIEPNYSNKYPPIGLMKLSTYHKMLGHEVVFYKGDLKQFVIERIANKCIDEFYKIDENINWNLYKDLFVEYIRTRRRDFLVQIPISSTNMEILLTNKINQFKDYYWKKNWEADPEWDRVFVTTLFTFHWRITIDTINFAKKLVKDTKNLMVGGVLATIQAKEVYEATGIKPFKGILNIPGQLDKRNQLIIDNLPLDYSILDEIEYKYPMNNAYYGYTTRGCIRKCPFCAVPKLEPVYNSYIPLRERIEETRKQYGDQKDLLLMDNNILASSEFDTIINDIVACGFGKDAIFIQPDLLALSIAHLRSTPVINERANIRKAQSLIMEFYQKLKGEESFEIYKIIFEKYKINKLLTTTKEHLLAAYDEIKDIYKKHFKPAPRHRYVDFNQGVDARLFTEENVKQLSRIAIRPLRIAFDNIKTEAQYTRAIEMSSKVGLKDFSNYLLYNFDDHPDDLYHRLRINVELCDRLNVSIYSFPMKYHPIRRTEDMDEDYSHNRDYIGKYWNRKYIRAIQAVLNSTKGKIGKGTSFFMKAFGENIEEYHKLLEMPETMIIYRYFFEWLGLENGGKKTAIEILGNDSICNASAHSWWKAFCTCKENVSSKEWEMALNIIHKNDFSKSYHTGNSYVDTLLGYYVSYRQAIIEPNTDLYKLKQVYDQNPLKELRRTQKIKMENVLLLEIKQLYDSLVAAPYGEYVHGYGTQKPNGFKYKSNAQTLFNKVVELNEKCRPSYIDEQTIFQLSHTLEKEVEHVVGTYEEAIKPNAAQKRWQELDDKMNRATRQIHLDIYSLLSYIEETSHEMKREIPDIALTLTPGIGPKGAVHLLDVFGSAEAVFSASADELIEKARLRPELARAILQKKAFADAEREVKHCRKHGIEIIASTDAQYPALLRETADYPHVLYVLGSPEALGKTTLTMVGTRRMTPYGQQMADRLIGELADRVADTVIVSGLAFGIDTACHRAALAFGMPTVGIIASALPGITPAQHTAVARDMIEHGGAVVSELHSQTRQNGNFYHSRNRLLAGISGGTVVVESPVEGGSMDTARLADGYNRTLMAVPGRATDFASAGANLLIRTQRAQMVCTGEDIVREMMWDQNRPGDLIDRPTAAPAALTRDEEGLLGCFRTDDPISAEELCELSGLGFGELSALLLGLEMAGAVRQLPGNRYMKLRMKQFVILFLLFTISPISFTFAQNKIFCEIIEQIVSQKKTRIYLDYGQERNKKKDIRLENENEKAEIFYSRVEALNIMSALGWKFEQAYVKVSGSSGNGYGSTSSTTHYLLSKDVDSIQEINNIIDEIKAKKSELNNIPTESEQRDTNSINKIFMNYLIDTHSHIYAEEFDADRDEAIRRAREAGVERLLLPAIDSESHGRLFDTVRRYPDHCTPMMGLHPTSINDNPRWREELALVERYLCSPPEGVGRFCAVGEIGLDYYWDDRFKAEQLEAFTKQCRLAATYDLPVAIHTRAAWKDMCRTVETETKAAREKGLRLRGVFHAFAEDADTYRQLKECGDFLFGIGGVVTFKKSRLADTVREMELDDLVLETDCPYLTPVPYRGQRNESGYIPYICNKIAALKGTTPEEVAAATTRNARRMFGFDAARQTTNDHSSPTESIMKPSILIIYTGGTIGMKPDPTTGALVPFDFSGIFEEFPTLQSLNIGIEVFTMDPVIDSSNVSPRNWLDLAAIIRDNYARYDGFVVLHGTDTMSYTASALSFLLENLAKPVVFTGSQIPIGVLRTDGRENLMTAIEIASARIDGRPAVPEVSLYFQNCLFRANRTTKRSSEDLSAFWSYNYPALADVGVNITYHTEYILQPERYDEPLHIAARLSGGIAVVKLFPGIEERTLRAMLSAEGLRGVVLETFGAGNAPTSEWFIRVLEEAIDRGLIVLNVTQCRGGRVMMELYETGLRLQRIGVLCGHDMTTEAAVTKLMYVLGLELPREQTLDLLRTPLKGEFTDMIVFSFAFFISKNVIFFCPVWLIAVQIRFILAFFDNPAVWSEKCPGFSFRQMKKLFLIVAVAIFSLGTVNAFAQETTTPATEETAVVEETVVDEVPASDTQLAEAKPMHQVLMQKFLEGGWEWMLPVLLCLVFGLAIAIERMLYLSLSTINSKKLIAQVEEALKKGGIEAAKEVCRNKRGPVASIFYQGLDRYNQGLDSVEKAVVSYGSVQTGRMESGLSWIGLFIALSPMLGFMGTVVGMIEAFDAIQAAGDISPTLVAGGIKVALLTTLLGLIAAVILQLFYNYIVSKIDSLVNDMEDSSITLMDILTAYKKMKKILNILLGVILLITVILTVYAMVAGGSNEAINLNLIWSYILIAVGIATALFTAVWGMVNSSKGIKGTLLSTLLIIVIVAAAYLIARGHTIEIPDVANGGFFPHPETVITEASILVTYVALGAAVLTAIFTEIYKAFKMPIDKRKVQEINAGSMADIAFLLLIFFLVATTMNVDTGIARNLPPMPPEDQKVEDMKVKIRNLLPVLVNGRGDIFVGRAGEQEYVDIHQLKDRAKDFLLNVMDDPNLPEKEVEEFELPDGSKWSYPVGKGVLSLQTTKDTQYQIYIMVQNELTRAINEIRDEVSKNKFQMKFSDLGEAERGIVAKAVPMSISEAEPRDLGGKKMAVIKKKGNKSLPPISTASLPDVIFMILFFFMVSTTMRDQELHVKYQVPEATEVQKLEKKSLVSYIHIGEPIGVWREQYGPAPRIQLNDAFKTAQDIGQFVAAERDKLNESERALMTICLKADRYTTMGRITEIKQELRRANALKISYAAAKTLGYMALFVLYLSVFLFFIPRLFPNRRIKRRCIITGKPLRYYRYRGSIMYGQDTFFAVNLDVCSYIPERGCAKFLNLTHPLREMKIICIGRNYAEHVKELHNTAGGPDGLPTEPVFFLKPDTALLRNNDPFYIPSFSQEVHYECELVVRINRVGKCIEERFAHRYYDEVGLGIDFTARDLQREAIARGLPWERAKGFDHSAALSPEFIPLAELGGDVQRLHFELTIDGQVRQRGDTARMLFGIDRIIHHISQYITLKIGDLIYTGTPAGVGPVHPGDNLKASLEGHMLLDFDIRMKPQLLLPLLLAALLPMTASAQSGEGEFPDLFNTSAAYDILAVFPQADKLAEDPFFTGTLGADTLFLDRAHRIDSVVRPSQLCNLYSLSGGSKDDPEQVVEFFASFDPESLPQKVRGAWIDEICSVRDELSYCLQRLAQAGYAQYWQEQVRPCLNNAIEQYRIAPEQLGAIHQEITRLAGGQPLDATGSRIYILGNIDNAFALLDETFCCTPLLLDPETARQYRIDFMQVYIHENLHRLSLSGELLDMLQTLYDNDDFYRTHEDRARAYGEGGNEAFVVAAERYVSRRLGRIDDKQVLDEFLVYCDGTHVLAPIVYRYLPDLRDGESFDGFLRRLLDRRIRPGKVESQYRRAMKKLAGTRKSETTATETRSMLLHDKLKPYRLILASQSPRRQQLLAESGLPYEPAPRYDCQEVYPATLAATQVPRYLSQLKSRAYPRPLAENEILLTADTVVILNGEVLGKPEDREDAIRMLERLSGHRHTVVTGVTLRTARRRRSFSVRSNVWFRALTREEIVYYVDNFHPLDKAGSYGIQEWIGYAAIERIDGSFFNVMGLPIQRVYTELNQFIQSIKNNPMKRIFSTLCLALLSLTALADEGMWLPSLISSRIDDMRAKGFQLTAEDIYSINKASLKDAVMLFDDGCTAELISPEGLLITNHHCGYGAIQRLSSVEHDYLTDGFWAQSREEELPNENLNVKFLKRMEDITERLAAGESREEILEKARENGRYKASIEQMYYGNQQFLFVYEQFDDVRLVGTPPSSIGKFGGDTDNWAWPRHTGDFSMFRIYADKDNRPAAYSPDNVPYRSKKHFKISTEGIQEGDFTMIYGFPGNTQEYILSDAVDYIVHRSDPMKIRIRTERLDRINAAQEKDPAMRIMYAAINAGISNAWKKWQGEALGLTRLNTVASKQEYERAFQAWAQDKPEYRDVLKELKAEYARIFDAYFALELMSETIRTGELNRIYNRPSFGDEIYPQVKALNRDLFRVLYREYYDNCPQEYMVPLFAAEVERLGSPEAYAELMFEATHKEDESTEAPELEALRADIRTTVTRIFDELGKCSTRNLNSERLNELYTTYIKGLREWDTERAFYPDANLTLRVAYGKVGGYRYADGVYHKPYTTVEGILEKDNPEIYDYNIPQRLRDIIAAKDYGRWGVEIDGRTTVPVCFLADNHTTGGNSGSPVLNGRGELIGVNFDRTWLSTMSDIAFDPAFCRNIALDIRYVLFVIDRIGDASYLFEEMDFAEMKVRVYLSVGALLLFLAPLGCSDKAESPAPETPPEEQPTPEPEPEKPEFVDANMSMEELMKTEDPDRNYRLVSYRDDTCAMYSFFDPMTELQRGTPRDQLQWVSEKVDGNSVCWTYRITNGDHDEAVRQILERWAEKEDEEEMKKEKKIIWLLTGIAAVSLLVLCTVVIVRTATYPFIRTTGPDGPPRSVEPSAQAVERLAGGIRIPTVSDAIDRTDDNPFQAFKAYLPQAYPAIYSQLDTLTINEYGLVFRWPGKNPALPPILLCSHYDVVPVLNYDPSAPDAPLPGWDYPPFSGAVADGRIYGRGTLDMKGMLFSILEATDSLLAEGFRPERDVWIALGFDEETGGTQGALKIARYFEEQGIAFDAVYDEGGIIIAPGLGGIQRTAALVGTAEKGFSTIRITVRGTGGHSSMPPEKGSLVLAAEIIEMLNQERMPAFLTAPVIAFLDRIGGSMGVAQRTAIANRWLLESPLLRSFESNPATNALVRTTTAITMARGSDAANVLASEAEVTVNFRLLPGNTTAQVKRHVENICNGYDVRIEELSTREPSQISPDDVHAFEMIRTSLAGLYPGTIVTPYLTLGGTDAYKYEAVSPNVYRFMPVLLTEQEQGTIHNENESISLENYGRMIAYFRDLIRNYRMKPLQLTKSMQSAKLNWRQILFAGLLIGSLFCSPVVTLFAGILFALTLGNPFPVWSKKASKKLLQYCVVGLGFGMNFHESLAAGREGMTFTVVSVVTVMIVGVVLGRLLRIDRKNSYLISSGTAICGGSAIAAVAPVIDADENQTSLSLATIFILNAVALFVFPVIGHWLGMGQTQFGTWAAIAIHDTSSVVGAGATYGEEALKVATTVKLTRALWIIPLSLVSALIFRQKGKKIQIPWFIFWFVVAMLVNTYCNLPTQLTHGISVAARCGLSATLFLIGGGLSIEVIRKVGLKPLVLGIILWAVISVASLAVILLLMETDLKFRPFRSPADPGWDEAWAIYQNSFPQKEIRSLEDHLQALSDPHYTADGIWSDGRLIGILYYWTAPEYVYIEHLAISPDLRGANMGSRVLEAFCRKAGRIVLEIDPPETEIAVRRLRFYERLGFVRNDYHYVHPSFQRPYEPHQLVLMSYPKAMTDEECRSFERFVRDPVLRYSCHGKKEMDDFRLRVFITAAKTLNFTKCAEQLYISQPAVSKHIGELESRYKVQLFERSGSRLALTEAGRVMLEHAERIADGYRRLQYEMDLFTDRLGGELKVGASTTIAQYVLPQVLARFTARFPEVKVSLASGNSEQVEAALARHDTDLGLVESSARHPGFHYEPFIPDELVLIASTKGWYGRCDQVTLAELQTVPLVLRESGSGTLEVISKYLAAADVRLASLRVVMQLGSTESIKSFVRNSDAMAIVSVASIVDELRSGELRIIDIEGCTIRREFSFCWPEGRSDALAARFVEFARHTAMVSQEDIERLRELLARPAQNIVIVSHTNPDGDAVGSSLAWREALLEMGHRVTCIVPNKYPYFLDWMTGIENLVLFKTDEAGVARRAVEESDLIFFLDFNAVSRLEGLSEVIESNTTARRILIDHHLSPGPGFDLMFSCTGSSSTSFLIYRILEKMLGTQAITRSMAESLYVGMMTDTGNFSFSFLTPELYRAVAVLVETGIDIPTIHNNVYNAFTEGRARLFGYAINRKMEVIHNGTVAYMSLLESEMRRFQFQPGDSEGFVNYPLTIKSMKLSAIFVATHKFIRVSLRSRGGVDVDLFARKYFNGGGHRNAAGGKSFMTMRETIEHFKRSVAEFAAQGGLDMIMKRFYHAILACGVFAAVVAAVSCTKDATGGGGGGYNGEPEVNHDMDGILRRNYLWNEEYATLSPDFGLPYDEFLGDVLMRMKTNDLDKKFRNGRWQLYSNIQRLSPVSRVALSADIDSQFPKEPVYGFGIVSLAIISYTDNGGAETGQYGFAVMAVYPDSPMARAGLGRGTIINQVDGQWITAGNLNTVYSKLLAPNGAATLSVADNQGGFGVSEHKLTAELIYENPVLYRDVLEYGEHKIGYLVYASFDAAFDGELLDALQAFKDAGINDLILDLRLNGGGYVMSSRMLASCIAGARCEGQVFQYYRYNDARMEYPEMTAAETGQAYDESKERFYEEFIYGDYRGADLRGYALDLPRLYVIVSSGTASASEAVVNALRGIGLEVVLVGQKTNGKNVGMEGVYLEDGAYEYLFMPVSFQGYNARLETVDPNGLAPDALKGDWNNGYEEFGSLDDPCLEYAVTSITGQSVRSSESAAQRRPGVRLVEGLSLPEISCRPEGMILLPPDAVRKDMTLKERYAGVIAWFEEHMPVAESELAYGSPYELLVAVILSAQCTDKRVNMTTPALFEAFPTPQAMAAATPEQIYPYIKSISYPNNKAKNLAGMARMLCEEFGGEVPSDLKELQRLPGVGRKTANVVGAVIWQKEVMPVDTHVFRVSNRIGLTNRSKTPLQTELTLEKYIPSHLLPTAHHWLILHGRYVCTARAPKCAECGVSTWCRKYAEDNKRSKTEMESQILKGLNQAQRDAVVNYDSPSLIIAGAGSGKTRVLTSRIAYMIEQGVAPYNILALTFTNKAAEQMRERIAQMLPDGRHRYIRMGTFHSVFSRILRDNAERIGFPQSFTIYEPSDCKNLLKTIVKELNLDDTKYKPAMLASRISYAKNCLVTPGAYLANAGAAAEDRRMQIPEFGNIYNIYCARCKRNGAMDFDDLLLQTNILLRDCPDVTARYQEQFKYILVDEYQDTNYAQYVIIRRLSQLHSKVCVVGDDAQSIYSFRGAKIENILSFKKDFPNAMIFKLEQNYRSTRTIVEAANSVIERNSKRMEKKCFSEGDMGEKIRVLRAYTDREEAEMVVSDLRDKVRAAGDEWAEAAILYRTNNQSQALEDALRRKGIPYRIYKGNSFYDHKEIKDLLAYIRLVINPRDDEAFKRIVNYPARGIGDTTVERIALLAKARNLSMWEAVDALTAEPVTDPVQKTIVRKVAEFVALVRGLSLARAEKGLYDLGLEIATRSGIIGAYRAENTPEATSALDNIEELLNSMQLFNEQREAEIRAGERQQEERATIEEWLQGVMLMTDMDKDDPQDRNKVTLMTVHSAKGLEYKFVYIVGLEENLFPSQRAVESPDGFEEERRLFYVALTRAKELATLSYAEMRFKWGNMEFSRPSCFLREIDSRYLETDAMQEEREPVRRSAGRGEGSSALDELRRRFDYRYQQKPAAGGSQAGARFGGGSSAGVKSEAQRPVVVQPTRSTAGMRSVGVRQGESSLVEGAAPVSCGDYAVGDRVSHLKFGAGVIRRIETLASDHKLVVEFSGYGEKTLLAKFAKLTKLMFSVFMQRIPYKIIAKYVFFSKIENPDRSFRPDAGRCPGMSEVINIKELNERIERESVFVDTLRSEMGKVIIGQNHLIDTLLIGLLSNGHILLEGVPGLAKTLAITTLAKAVDADFSRIQFTPDLLPADLIGTLIYSQKKEEFLVRKGPVFANFVLADEINRSPAKVQSALLEAMQERQVTIGDETYPLPEPFLVLATQNPLEQEGTYPLPEAQVDRFMLKAKISYPQKQEERDIMRMNLAGEGLPKVNKVTSPEDIVKARRVVEEVYMDEKIEKYIIDIIFATREPAEYNLEKLQPLIAYGGSPRASISLAKAARAYAFIRRRGYVIPEDVRAVCHDVLCHRIGLTYEAEAENITTEQIITDILNNVIVPMQETENDILKRVRKIEIKTRGLSNEIFAGKYHTAFRGRGMSFSEVREYRAGDDVRDIDWNVTARSRTPHIKVYEEERELTMMLLVDVSGSRMFGTTDRLKKNLQTEIAAVLAFSASENNDKVGCIFFSDRIEKFIPPKKGRSHILAIIRELVGFEPQSRGTRISEALRFLTNVTKKHCTAFLLSDFLDPGKDRTALEDALKIASGKHDLVGIRVSDPREAELPDVGIVEMKDAETGRKAWVDTSSARVREHYARVWQERSAAILSALKHHRIDTAEVSTDGDYVVELIKLFKQRMKSIPNNPASTCSPFARNGGIQPSAAAERQNAAQTPPSEAVPVGLRSSGRPKAGRTSITKRVKTALATALLTGLTTVLYAAPPTITARVEPDSIGIGDRFDVVIDVDRDLVQVVEFPTFNPPPQSGLEVVESHPVDTLRRDGRHLSLRKRYTLAAFEEGNLGLGRAQVLYLDKNITDTLYTADTLRLQVGTFQIDSTSHTIYDIKAQRTLPFRYGEISGYVLWSLLGLIVLGGAIYAGRRLMARYARKVRDIFRPAPPLPPHIAAIQALETLHNQKLWQSGRHKQYYSGLTDILRTYLAGRYGFGAMEMTSDEILAAVRRYDLPQKCVMDLQAILRDADLAKFAKAQSEGTTNEDNYLNAYYFVEETKPAEIAEEGTEQDDTQMPNRILLIFITLLLGIGSASAQKYPERSLVRKGNRDFAKERYDRSIERYTQALEAAPENFEAAYNLGGALYRTEKYEEAAKMLERIAADSTRTDQERAEAFYNLGNAQFKQEKYPEALESYKNSLRMNPADQEAKYNYAYTKRLLQKQQNEDQNKDQNKDQQNSGGQDQNQDKNKDNNSDKDRQQDKGGEQQDQQDRQNGQNDPDKNGQNPDEQPQDSDKPDSDDRQPGQPRENGISPEEQERMLDAIQTQEDKTQEKLKEKAGVVVRGNKNWMQFASPYFLWLLAVIPLMVVYYVWRTRQGGASIQVSTIDGVAEAPRTVRYYLRHLPFALRCAAVALLIVALARPQSVDEGSTSNTEGIDIVLAIDISTSMLAQDLQPDRIQAAKQVAGNFITDRPGDRIGLVAFAGEAFTQSPLTTDQGTLQTLLGRLRSGVVEDGTAIGNGLATAINRLRESNAKSKVIILLTDGENNRGEIAPLTAAEIARDQGIRVYTIGVGTRGTAPYPTVDFFGNPTVVQAKVQIDEKILGEIADLTGGRYFRATDNAKLQSIYDEINQLEKSKVEISQYTTYTEEYLRWAAAALALLLVEFLLRTLWLKSLPMFRFAYPEYLWLLWLLPLLVAVWTAAGQLARRRLSRFGRLETIRPLMPDASTGRRRLKFILYLTAFALLTLALARPQLGSKLREVESRGIEMMLVVDVSNSMLAEDFQPNRLERTKYAIDKLFDGLKQDRVGLVVFAGDAVVQLPITSDYRMAKAFARRISPSMVSVQGTDIGQALSLATMSFSEKGDNPAGRVIVLITDGEGHDSGAIEAAERAAEQGIRIFTIGIGTPEGAPIQIGGEFIKDDKGEMVVSKLGEPLLEKIAQATDGAYIRSTNQSIGLDEIVRTINNMEKGDLAALRFEEFNEQFQYLIGAALVLLLLEFLLLDRRNPLLRRFNIFGTDTEKMQNRDSNWRHFLGDRCRIVRCDPVPGRIFTSERLLWALAVVIGIELLVSQVISWEVSVWVAMCGDGLLALGTLGLFLARIYRNREVDWLLLFVAVMMVLLAANHWEIAQSHPIAGMYLISILILSSCQVADVQNGTEKKDNFLQEVGRLSDFVLSQSKVGGYLSEEDAVILDNWLKELSTRYDFQNNFDYCGDIYTRSDYEPDFYDYLNWIEENATSGFYQIIYRWLVDEEFDDDLNQILANTILLPNEQVAIAVVYPLVQNSLVEFESRGGVDQCYDQYNSDIKRCKRDYHITMAVVTAVSVLSGGSAAPAAAVSLVGNTVALKSCMDGAARTFDICVKYAKMFYHAKIFGTQSGQGKILQGIRLPLLIGCRRQGYPIWCRLRLVVRERGFPSDCNYFIIKNNVFIVCLCENYYNCIGLFCINQVDWKMIRNILVVFLLLFVGFSCDLKNRKTKNLRDIYGQNLILPGHATWKIEGRDTVINIENLAPKLVVYYSSGTCAPCSLKGLHHWGKIIDSVELVGPSLEIVFIIKANRYDSLFFHSLNSEHFIFPVLCDKEGEFEENNLLPINKEYNAFLLDSNNEVVYVGSPLLGRKMRSLFISIVKVLNNDYRNGVNSDLPSSDTIDNISSMRGRALDCCRNRGRAGTNPGTPERPSETGTAALRTGQAITLYFFPAATFIDHPAVSGTPRTPLQRFSGTAFLFRPFFPAVFIVILITNDYIMAKINTPEELRLMREKLRADLEIRENSNTPDELPQIRVSMDECGIAAGAKAVLATFVEELAARRIRGIVTQTGCAGHCKDEPTVEITLPGRRPVLYGHVTAERVAELVERQIVRGETAEGLIEAMAKINNYILVCGGTGCRASRSEEIIAALRRALDRTGESERTRVIRTGCFGFCEQGPIVKMIPDNTFYVSVKPEDAEEIVREHVVKGRKVERLLYTAPDTGQHVPDSKHMKFYKPQLRIALRNCGFIDPENIGEYIARDGYAALAKVLGMQPDHVLQEIIDSGLRGRGGGGFPTGLKWKITRDAKADRKYVVCNADEGDPGAFMDRSILEGDPHSILEAMAINGYCTGASHGLIYIRAEYPLAIERLRRAIEQAREYGLLGNDILGSGFSFDIELRYGAGAFVCGEETALIHSMEGRRGEPTVKPPYPSESGYKGYPTNVNNVETYANIPPILLRGAEWFSSIGTEKSKGTKVFALAGKVNNVGLIEVPMGTTLREVIFEIGGGIKNGKKFKAVQTGGPSGGCLTEKHLDTPIDYDNLLASGSMMGSGGMIVMDEDDCMVSVAKFYLEFTVDESCGKCTPCRIGNKRLLEILDRITRGLGRDEDLDELQNLARVIRDSSLCALGQTAPNPVLSTLENFWDEYVAHVRDHHCTAHRCRDLMSFVIDPKVCKGCSLCARMCPPGAISGIPKQPYAIDQARCIKCGTCLEKCKFGAISIRMETIKLTIDNRTAEVAPGTNLVEAAASVGIKIPTLCYLNLHELGCKNDPGVCRICVVEVEGRKNLAPACKTVCTEGMVVRTHTPRVINARQTILELILSDHPNECLTCSKNGYCSLQTMAKDLGIREAKYKGETTKPMMDLSPSVVRNMEKCILCRRCETVCNQVQTVGALSVVGRGFTSVLCTAFNDPILTTNCVNCGQCVAVCPTSALSENSNIREVMQALADPGKTVVVQTAPAVRVALGQDFGLEGRSVTGKMTTALRRLGFDYVFDTDFAADLTIMEEGTELLQRLNKYLAGDRTVKIPLMTSCCPGWVSFMEKHFPELGENLSTAKSPQQMFGAIAKNYLAPKLGIDRRNFIVVSVMPCVAKKSEAARPEFGKDGDPDVNISITTRELAHMIRFANMNFDELEESDFDRPLGESTGAGVIFGTTGGVIEAAVRTAYEIQTKKTLPKLDFTELRGLAGIRSATIDFDGVPVKIGIAHGLGNARRLVEEIRAGRSPYHAIEIMACPGGCINGGGQPYHRGNEELLKRRAEALYAEDAAKPLRKSHENPDIQALYEEFLGEPCGPLSHELLHTRYYDRKPVVEPKKMEKICLSQRRIDEIKNVCRKYGNDPGELINILHGVQDTLGYLPKEVQELIALELGISAARVYGVVSFYSFFTMKPKGKYPISVCMGTACYVRGGEKVLDEFRRQLGIEVGGTTPDGLFSLDSLRCVGACGLAPVVMIGPRVYGRLKVTDVKGILDEIQALEKEIMNQLEEFKALGLSDDILTAIAKKGFETPSAIQSLTIPHLLTTDKDIIAQAQTGTGKTAAFGLPIIQMLTSRRNIPQAIVLVPTRELALQVTQELISFNTHDLSIAPIYGGASMTEQLRRLKKGIDIVVGTPGRILDHIRRGTLDLSAIAYLVLDEADEMLNMGFIEDIEEIMHAMTGPKRVLLFSATMPDRIAALARNYMHEPDLLKVESQHVTTDLTNQIYFEVREGDKFDALTRIIDVEPEFYGIVFSRTRTGADDIVAKLLERGYAAEVLHGDISQAQREKILGKFKKKQVNILVATDVAARGIDVSNLTHVINYSLPQDSDSYVHRIGRTGRAGNQGTAITFISPSEMRKFGFLKRTIKADIKLEQLPTPADIIATKRNKIKEDLDAIVESESYGECTGMAAELLESYPPEVALSALLRLAFKNELSESSYPEIRSIDVDRKGKARIFLAFGARDGYDTRKTVRLLKQECGLSDHDIDDVRVMEDFSFATVPFDQAEKVVRTLNKLSHGRPIAEISKDSPSARTSGGRQSHRRRESDTRSGRKTGRKPESRESYRQDSSVQEAFGAPDDRNGHRKSVRSPKTSGTKAGKKPATTVKASSKTYTPEKTAAKRASELPENWFEEWFGQRQPARNKKGPNRTPKRKNRDMENLSVNPENYKILVVDDIATNVLLLKTILGKAGYRIVTATGGREALEKVESESPDLILLDIMMPDMNGYEVIERLKADERFCRIPVIFLSALHDSENIVKGFKMGASDYVSKPFNHEELITRVAHHMFIAEAQRVIVRQNEELQETLASRDKMYSVIAHDLRSPIGSLKMLFNTLLDSLDAERVGAGNLDMLRMGNDIAEDTFSLLDNLLKWTKCQTGRMHTVYQDVDLAEVVLFSSKISESVARTKGIVVEYDIPAPIHVRCDVDMVKTIVRNLLSNAIKYSPEGGGKIIVSTAETPTHAVVRVRDFGVGIKPEDLNKVLDPAMYFTTYGTGKEEGSGLGLQLCLDLVHRNGGEMTVESVYGEGATFSFTIAKSPADERPASAGEPVMDKQKIFVVDDKDMIGKIIMACLGRDYDCRYFDSPKPVLEQMEAGDLPDLIISDIRMPDMRGDEFLHAVKSDERFRHIRMVMLSSEDSTSERIQLLQDGAEDYIVKPFNPMELKVRIEKFLKMYKEYTQKRQKFVVFIAVSSEYRCIQPQNNRLKIIYPCMKVGSLHMGLTDKTVLLSLCCPVKNKLQQRESSRMDTEESMGNHNFHPMAFASDLTETALQIAAMRFSFGINIICIFFEEWLPVVFDMNRILPILILSYLHINILHPFFINCEVWKFSKIRPMYDKCMTKMITFAIDKTSMASFCYRIRSTQKNKLVKIQILFTVGRGNQFYADCQYMVLTDAWDNKRQTVKSRFTFTDDFTEQQGRELTKNLAELRSHILGEITKDPEHAMTKTRLEKIIYSFHHPRSLTTGRHVRSRESLGDYIARFTHEMEDGTRLNIHKLRYGASTIKNYKGFIIQFDEFCKAKRKRFDFGDIDLKFYDDFVAWFTAKDYSINTIGRHVKELKIIMRAAREEGLHDNGLIESRKFRVLTADVENIYLTESEIRAIANLDLSDNKHKDIARDVFLVGCYTAQRFSDYSTINEGNIRTLESGQLVIDLKQQKTGNHVIIPVRPELQAILDKYENRLPKSYEQKVNKFIKEITREAGITEKIEVSYVENGERKTHLVEKCDLVKTHTARRSGATNMYLAGIPTIAIMKITGHKTEKEFMKYIKITEEQTAMELMNHPYFSGRMTVEELTNILDSLLILPAETEVVEFKRAERNFDDRDLGQYFSALSNEANLKGRPCAWLVFGVENHTHEVVGSQYKNSRPALDAMKKKIADQTTGRHTFVEIHELRYRNGKRVVMFEIPPAPQGIPIDYQGHYYGRDGESLQALSMDKIERIRNQAKLKDWSAEIIENASLEDLDPAAIVKARELYTNARKDKADEIASWDDTTFLNKAKITIRGKITNTAIVLLGREESEHLISPAVAKIKWILRGPDNVERDYMIASCPFILAVDKIYDKIRNLKYRYINPEYKTLFPEEIDTYEPYVIREALNNAIAHQDYTLGGQINVVEYDDKLVFSNKGSFIPGNIERVLVSDAPEERYRNQFLVTAMVGLKMVDTIGSGIRKMYNYQRQRLFPLPDYNLADNRVEVTITGKILDMNYANILAGNADLNLLDIELLNRVQLGKPLSDEEIARLRSKRLIEGRKPKIYIAKHIAQKVGQKIEYSEHKGLGNKRCEEFLLTALRDHKSLSRREIDKLLWNLLSNLLDDRQKKDKITNLLAKLKRQGKIRNESQGPNSDWFIVMSRRRKIEIKASELACFDTLVETLRTRPEFADLDPTSLHVWAYENYEPTIRNAARAIRHFDHWLAAHRNEMFLSSYSGNRLFCKKDLAEALGITRPTLDRWIANGWLEGCTARAFSNGERCYSADAVREALEKLKMFRRTVLIKNRLLLFIETITLHTAVKTENRGRPMQFIPKIPMAKEIYLNGMTADQLSKMIRESLRDELQQFRPAHPKTDTKYLTRRETAHRLRISLVTLTDWVNHGKIRAHKIGGRVLFRDSDVEAALNRIVPIKMKTIQAIKHLSIRTYLAEQGLHPTKDNPRYGLYLSPLREEHTPSFKVDYVRNLWYDFDAPIMKMEGMSETVNLFDCLVRANTILFHYTTPDGRDEMVKFPLNFGWGGTANGYYYYGAFDLRNGPEAGYDGEDTSSSSDKYYDMELIVTYTNCPMTRKNLILLLFSLLTLNSCNKHEGPELRFCENYIQNYCQGDLVLLSRSPDRPPQIPADPQTPIRNFWIELTDCEWISPESDPQEFERLAIRNGDVGYNRWLEFWEYPSAFADNFQTMHITSNADWDEEHPAGTLLDDILWAEFWSYADYIRSGYETGGGNNVQMLVEDLKADDMQMIRDYVIIYFTKTPTIDPIHTLTVEWTTVEGEVKTASLTCRPQVNAKEMKKSLLLLLLPFLCGCSEKEEPIGGPVIGPTYLIARYVEGDMKLDYIPRTAATDGKSNTLYIDWADTEEYYNPDMEKYNLGRQEFWTPENKAKYLEIAKRNGDEIGAYEGGTPPGLYFGDQIALADNFTSMHITSDADWDEEHPAGKPLDDLFRVSVRSWKQRDEYGAPLLCRERMDRIGPEHLQMIPFNPKNPWDGRKNLRPIEIEPLAEPASEQHHRLTLTMTTTDGRTKSTSIDYPPKTGLMKKILFTLLLVLGISAAADAQVRFLDSSTDAVRKEAIAQDKLVFIDLYATWCGPCKAMERDVFSKKEVGDFMDEYFVAAKYDIDKPTGKALAGKHGIRSIPTYLVFNTEGDLLGKITGSMPAEEFTAALRKIIAETGKKMPRHEYLYGQTLPQLEALCNRLEMPRFAAKQIARWLYDKHATTIEAMSDLSARHRALLAETYEVGLTAPEKVSISTDGTKKYLYRTSQNHFIESAYIPDGDRATLCISSQAGCRMGCRFCATGRQGLQHSLSTNEILNQIESLPERERLTNVVFMGMGEPLDNLDSLLPALEVLTSAWGFGWSPTRITVSTAGVASRLERFLEATQVHLAVSLHNPFPHERAEIMPIEKAWPIREVVEILRRYDFTHQRRVSFEYIVMSGLNDSPRHIRELCRLLDGIKCRINLIRFHKIPGSPYFSPDDRAMIAFRDALTAKGIHTTIRTSRGEDIQAACGLLSTAQNEAAQFMEIKKSPKADLENKRGLFLEIGLVVALVLVIGAFAVTPKEHRIEKVDLGYAPVEVEIVEVTREDQKPPEAPKKVDMAVVSDMLEVVTNDTKIETEIDFAEFDVNQAIEVAPVQTEEVFEEEIFIVVEEKASFMGGDEGTFRNWVQQRVKYPAIAQENGIQGKVTISFVVNTDGSVSNIEVLRTPDRTLSDEAVRIIKSSPKWTAAKQRNKSVRQKFVIPIDFRISDMIVLRYNLFILILFQSAIRFLHDYAPSARHIFLHGENKGIPASRRIPLSNVSNKPMEQNKNKEIVAKNDQPASGAGFERAVLVAVIRDQQDPRQAEEYLAELEFLAETAGIVGVRRFTQRLPQPSARIYVGPGKLEEIAAYCKEEEIDVAIFDDELSPSQTRNIEAAMPCRILDRTRLILDIFMSRAQTAYAKTQVQLANYQYMLPRLSGMWTHLERQRGGTGTRGGAGEREIETDRRIIRNRISKLKEDLQKIDRQMAVQRSNRGSMVRVALVGYTNVGKSTLMNLISKSEVFAENKLFATLDTTVRKVVFDNLPFLLSDTVGFIRKLPTELIESFKSTLDEVREADLLLHVVDISHPQFEDQIAVVKQTLQDIGAGDKPVYLVFNKVDAYTYVEKEPDDLTPSTRENRSLEDLKQSWIARANTPCIFISAVEKINIEKLRSDLYGMVREIHSGRYPFNNFLYMLHILNSQNTVLNKFVAEIRDKSIQKDSMRFRRNLERIGEVMAYEISKTFEYAVKVVETPLGEASVAMISDQVVIATILRAGLPFHQGFLNYFDDAQNAFVSAYRKSTKDGKFTVKVEYISCGELEGKTLLLVDPMLATGSSLVLAYNALCERGGQPAHTHVAAVIASEQGVEYVEKNMPKRTTTIWCAAVDEELTSRAYIVPGIGDAGDLAYGEKIMLLQKPAFLLFYHTRAAEASFGEWLGVLWHGLSLDCTVAGYVTAFPVVVVLASFWIPLSQRVWRIILTVYFSLIALVTAAIFAVDLNLYGYWGFRLDGSVLIYLADPGEALASASWGEVLRQIIIMLVYAGAMIWSYRRILRLFRVEPVSLRGRIVPTVAALLIGGLTFLAIRGGVTVATANVSKVYFSSNMFLNHAATNPVFSFLSSVGDNENYAEAYPFFEEERRKTLFEELRGNRPGADAGTPRLLRSDRPNVVLILLESFGRTIMDETVNGEPVMPNMQRFKREGVWFENFFANSFRTDRGQVAVLCGFPAQTTMSIMKLPRKSATLPSLARSLGREGYRSVFMYGGDLNFTNQASFMYSTGWEELIWQKDMQLDAPTSKWGYADDVVVDLFGDEVEALGRAEQPFLAGLLTLSSHEPFEVPFAKFDDKLLNAMAFSDAQIGRLIDRLRESPVWDNLLVVLVADHGYPYPYDLAYNAPLRHRIPMIWLGGALAAPPRTVDTYASQIDICATLLAQLGLPHDEFDYSKNIFGATPPHKFGYYCFSDGFGVIDADGETVYDNTGETVLSQTGPQSERLEWGKAMLQTTYEDIGRRMKLTCAIIDDEPLAVELLESYVRKTPFLELKGAYNGGITALEALKTEPVDLLFCDIQMPELNGMELSRMLPARTRVVFTTAFDRYAVEGFRVGAVDYLLKPISYADFLTAANKAFEWFELKRRSVGKPSPAEAGPESIFVKTEYRLRQIELDKILYIEGLKDYVKIYVEDEPRPVLSLASLKSLEEQLPAERFVRVHRSYIVQPAKIRIIERGRIVFGKTYIPVSDGYKEAFYAFLEARSLMPKGDKMKYPDNSYICNRMTSLQSRHTGFWLHLAAWSVVFGLPLFVPGGREPVMNMQEYVRFLVVPLSFMAVFYVNYLLLIDRYLFTRHVGRFLLANALLVAGVMLLVHLFFRFGIPPRPHHPPMERPWQDTMFFFLRNAMLYLLVVGVSVAIRMTGQWYRAENIRKDLERSRSEAELQNLKSQLNPHFLFNTLNNIYSLIQLDPDRAQQTVHDLSRLLRYVLYDSSRPTVPLKAEMDFLGNYIELMRIRLPRHVRLDVSLPENPSHTLVAPLLFISLVENAFKHGVSNDRPSFIDIDIREEEGVLACRIENSFFPKSGADRSGSGIGLANLCRRLEMIYPGRYEMKYGQHGDTYETLLRINLTDRMNLTNLFKIAFKALSNNKLRGFLTMLGIIIGVGSVITMLAIGQGSKRSIQAQISEMGSNMIMIHPGGDRRGGVRLDAADMESLKLKDLEDIQAQARYISYISPSVNSSGQAIFGANNTPTTVYGISPEYLDIRRYKVEDGDIFSEQDVKTAAKVCLVGKSVVDELFPDGESPVGKVIRFGKIPLRIVGVLESKGYNSMGMDQDDLILAPYTTVQKRILAITHLQSITCSALSEEYTDQAIEEITQILRTNHKLKATDEDDFTIRSQQELSSMLTSTTDMMTLLLAAVAGISLLVGGIGIMNIMYVSVTERTREIGLRMSIGAKGRDILAQFLIESILISVTGGVIGILVGVGAAVLVNIFAAFPIYIQPWSVFLSFAVCTLTGIFFGWYPAQKAAMLNPIDALRYEMKEVIRLDNIRRDFVVGDEVVHALRGISLTITEGEFVTIMGTSGSGKSTLLNTLGCLDTPTSGEYYLDGIAVRSMDKNARATLRNRKIGFVFQNYNLLAKTTALENVELPLMYNSTYSAAQRRERAEQALRNVGLGDRMLHKSNQMSGGQMQRVAIARALVNDPAVILADEATGNLDTRTSFEVLVLFQQLHAQGRTIIFVTHNPEIARYSSRNVTLRDGHIISDVRNEEILSAAEALAKLPATDDMKKRNLLIAAGVVAAGVCIWLIARPSKGPKVLLETAPISHITIRNSVTATGTVEPVTQVEVGTQVSGIIDKLYADYNDQVKAGQLIAEMDKVTLQAELESAQAQLASSKTEYEYQTKNYARTKTLHEKQLVSDAEYDQAFYLYETARNAYEQSQAAMVKVKRNLGYATITSPIDGVVISRAVEEGQTVAAGFETPTLFTIANDLTQMQVVADVDEADIGQVADGQRVQFSVDAYPDDTFEGTVLQVRLEATTESNVVTYEVVIDAPNPDLKLKPGLTANVTIFTLEKDDATAVPTKALRFVPNAELLGEIGLTAVETDSQAAPGSRELWVKEGTTLRPRRVYAGAASGDMTEITEGLTGSEEIVTGLVTAKPREETAAIERSPFMPGPPGSNDKKKMKRLLPILLCSLLLSGLRNATAQEASKTWTLQECLDYAYQNNIQVRQSRNNQLSGIEDTKQAKAALFPSLVASTTQSYTNYPSSEVTDNNSYTGTYGITAGMTIFEGGKLRTEVKRQKVQNQMDALSVEESVNDIRIAIVQAYMQCLYAADAVRINRSTAEASKAQRDRAEEMLRAGSISRVDFAQLQSQYSSDEYQVVVASSTLDNYKLQLKQLLELDIMEEMNPAVPGVKEENVLKALPSKDEVYATALKVMPQIRRGELGIEAAKLEEKSARAGFFPSISLSASVGTGHMSNNDFESGSQIWNRFNENVGLTLNIPIFSNRKNRTAVNKAKIALNDSYLEWTSLQKELLRNVESAYLDAVSAQAQYLSAREKEKYARESYELTSEQFRVGVKNTVELITAQNEYSAAQQQVLQAKYLTLLSIELLNIYQGLPASDIYMRAIEIDEEGNFIDERPVSGNNRNNEPCDPLGFRDAGSDTKKSADLYMPYRKSWNKLWRGFRRVCTLPLIVLVKFYQRCISPFTPASCRYTPTCSQYALEALRKYGPLKGTWLTLKRLSRCHPWGGSGYDPVPMTDRSLPRQERLRSFGAIRRLFESGESGFVYPLRYVWIAEADEIPSVEVLFSVPKKFQKRANKRNLQRRRMKEAYRLNKEIFDREGNPVALDLALIYSSKELTPYRVIEHAVQKIMEQIMARLMKAHRVLVSQPRPAVVEKSPFYELSQKHKAEIEYMPFIRVVGVSLKEFRSQRVEILAHTAVIFTSRTTVDSFFHICEEARITVPETMKYICQTEAVALYLQKYIVYRKRKISFADGSFTNFIELIIKHKEEKFMLALSEPHKPELPETLAKLKLQFSPVILARTVAADLNDLDIKKFDLLALYSPSDVKAILERFPAEELPAVATFGEGTLRAAVDVGIKVKAMAPTPTVPSMAKAVDIYLTKLAKGEQIEDVAVTHDADKEEFIRTQQHKLAKKSRTRRTTPAEKKMALQPEIRTDSLAGQLSDSLPTTETALRESIFRLRDSLATIPPDTLQATPPVTAEELFGAGSTLAIEPFPTQSVRPIYESAPFQGIVLALVFAYLVIIYHNLREVYILCRKLSLDRSKPGRMTDTQGSTYTRFLWAAIGIGLPMLALLTLRLTDRWFPIPEVVPEAWIPVLGLLATVGLAVLLLFQVGLLRITGYVTLSRPITDQLVALKFNYLALSVVFLCPLILLFLLASPDTGHILSFGILILGGALLLLYLKESLMLFLSKKISILHWFLYLCAVEIFPVSFVWLSLTRIMLKLGRKILSFRKRIVAIVVGVTMVTLSLLFTNDMARRLREKEQHEVALWVHAMERVMSDSSNDPFVQDILSQRNNIPFIITNQNLKVLHSHLIPEEIINHPDRLRKKINQLTEENTPITIQYYWGKDHKHIIFFGQSRLLKTLYWFPYIQLSVIAIFILLGFIAFRSTKQDEQNRVWIGLAKETAHQLGTPTSSLLGWIEYLRTQPVDQGAVEEMNKDLSHLMKIVDRFSKIGSETPLTPENINEIVSGSVMYFRTRAPRNVVIDYNGLAIAPVKAQINTALFEWVVENLIKNSLDALQGHGRIDVEISSDDKHVMIDIKDTGKGIPKSNWKRIFEPGFTTKTRGWGLGLSLSRRVIEEYHQGRIGVVYSELGKGTDIRITLKRYFDMNKKRPILRRAAIPAVLALLCTLFWFGKPNDFGLGRNMELLVNMMRELSLFYVDEVDPDQLMQDAAEGMTRNLDPYTEFLPEEQMSNFDLLTTGKYGGIGSMIRKKGDYVIFAQPYEGSPADRAGIRIGDKILSIEGEDTKGWDPAQISSALKGTPNTTVRIVIERLIGGEHDTLTLTRERVAIPSVPYAGFVAKGIGYIQHSDFTEGSYEEMRTAIEKLRTQDTLRGLILDYRGNGGGILQEAVKIVSMFVPKGTEVVRTKGRAATQENVFRTANDPILPDLPLAVLINGNSASAAEIVAGSLQDLDRAVLIGQKSFGKGLVQTTRPLGYNTLLKLTTAKYYIPSGRCIQAIDYSSRKQDGTVGKVADSLVREFTTRGGRKVYDGGGISPDIATEPQYISRFAVTLLAMGFIEDFVDEYMQEHHTDTIDNRTFSITDADYDAFVKFMEGKEVPYESETRRVLKVLKEAAENDLYSDLAQEITAIEGDLKDDTQTNLHTYRKEIAETINNDIVLRHSYQAGVIEHNLGDDTEVLRATEVLENPTEYQEITTMQTSEKKMKYLIRSVKYFIALCVLYLIIMALMLLTNTSVLTPSETFSALVHSTRGQVLIVAVVLLSALYPKFGFIRRQEIGSLRKNREQILNAFVSEGFKPVRESEHEMVFRADSLFKRLTLLFEDEIRVTQTGEWITIEGIRRGVARVYYRLQSYLERTRNENEMRVEIDSHSGFCFGVVRAISRAEEALQEQSEVFSLGDIVHNRVEVQRLERLGMHTVTHDQMPELGGRSLFIRAHGEPPSTYRLAEELGIELIDATCPVVAKLQRRVVEAHEKMRQVGGQVVILGKRGHAEVIGLTGQVEAPTLVVETEEDLDQIDFTRPIYFLSQTTQSISLFQHLCDRMRSRATDPAQVFAHDTICRQVSNRESHLEEFAGRFDVIIFVCGRKSSNGRVLFEVCRRANPRSYNVEEASELRPEWFEGAESVGICGATSTPKWLMQEVADAVAGQKPMECSKLKKIIIAIDGFSSCGKSTFAKTIAAKLGYIFIDTGAMYRAVTLYALEHGAIVSGIVDEEKVIALLDDISIDFRFNPERGASDIYVNGDRAEGRIRTIEVSNCVSRVSSIRQVREKLVAMQQAMGRQRGVVMDGRDIGTVVFPNAEMKIFMTADPEVRARRRYDELQAKGDSVSLEEIRANIVARDKADMTRAISPLRQADDAVVLDNSHMTVEEQMTWFMERFDRIACGRMYLEIIEILLRGFCVGVAASITVGPVAVLCIQRTLSKSRRSGIVSGLGVAAADTTMAMIAYFCYSMLQAQIDQYNQLLRVIAGIFVVIVGVYIFFQNPVPQIRRNRAGKTSLTQDFASIFGLTIANFVLVIPYILTFFAIFKISTIETFDIAGLGRGFLVILGFLGGAVLWWTSLAFLINLFRRRFRPRHMLTINHVAGIIIGVLGVYTILSTFFNLIPHGMLQAMLFLAGFLRKDTKTNLKFGPVSEKGMKRELQGICPGIMLISSLMAENQKMEIDLGEDVAQGNYINLAIIAHSVSEFIIDFATVLPGVPKAKVKSRVILTPEHAKRLLLSLQENITRYESNVGKIEIPAPQRHSPGDFPLGGGPKIGEAMNYNQTLEFLFSSLVSYQEKGPEAYKPGLERITAFCKHLGNPQRNYFTIHVAGTNGKGSVSHMLASVLQQAGYRTGLYTSPHLRDFRERILADGEMIPKQKVVNFVDKHYDCMKELGLSFFEMSTALAFDYFDQSDVEVAVIETGLGGRLDATNLIIPIVSVITNIGLDHMALLGDTLPKIAAEKAGIIKKSIPVVIGEKSDEYNHVFDQAATAMMSKIVYAENDFACINHSTEGDFQKFSIQRHRDNKVFNLELDLTGNYQVHNILTAIAVIDLLHQETPLTISLRALTEGMRTVASGTALQGRWQKLGDKPLTICDTGHNAHGIRYVAEQLAATPHRDLYCVLGFVNDKDLSSVLPLFPKEARYIFTQPGNERALPAGKLAEKAAAYGLRGEVADTVSGALARAREMASEEDMIFIGGSNFVVAEVLEMGRKFAAVLCSTLLLSPGWLGGTGFTLLFGLVPLLWISDSYDASRRSWWKVFGWALLTFVLWNVSTIWWIWLATPVGPFAATIASSFLNMVAFMLFHTVSKKGPKALAYTLLVSGWIATEYWYTTGDFSWPWLLLGNGFSHEVWAVQWYEYTGIFGGTLWVLLSNILLYEAWRRRRDAKAWTWAGAVVLLPILVSLGIFWSYEAPDEGSVTVSVVQPNIDCYDKFAAGTEQMQERLLLSMIEEAPAGSDFIVLPETVWPYAYDERYLPQAPVVTKIREILREKSSGAMIVTGAETIVYYPPEEQTETARQNERGAFYDKFNSTLGIDTTACLPIHHKGRLVIGVESTPTWIFKALKFLVIDLGGTVGQLGVGEPGPAFVHNGVSVGTPICYEGLYGNFYGGFVREGARALLISSNDGWWGDTPGHKHLFSIARLRAVEHRRAIARSANTGTSGFIDTRGDVQQKLGWDRRGILTGEVELNSELTFYTRYGDYLGRISELLMGLCILYYIAYRIKKKNHLVKMNSFFAEYAADSRNPRRIALGGGDRGIKTVFGRIVERLRFASRRNNRFGGNFCADFHSQVCKSEAYSVSLDRSVSVSRSFELINPPAINILAVFLRYFPAFEEGEAFRNSIPSAREIQEIAFGSKNSREAGGWIIQYAGRHGYDAETIDRFWRVYSMVANEDSYMKRLFFLIAIAFLMAGCSDKDDENVDMASVGHYVWQNESDHRITLTVIGRFENEVLLPKERISKTMIGFIFPPSPRSYTIEGMKISFDDGSYGGVFSIPTEYPTAPYNPCDEYNYEMGEEYKESGMLQRQWTYTFTNADYDAAVARGPMTEQMTKRIIGLILAIAAIAVIVIAAIRHNTYTSMIGPAATEMPAPEKTGQKKPAPETLRPDSLTAAKPDTVRQTGGHAGPEQMYRNSRLAILLPILLAAAVVLGLLLGRYLGRNTPEAQLRNLVEQLTHPTNKLAYTLSLIETEYVDSVSMDSLSEQVIPLLMEELDPHSVYIPKSEMEAVNEPLQGEFDGIGVVFNMAPDTVIVLNVIPSGPSDKAGVKAGDRIIRINDSLVAGQKIPNNEIVKRLRGKRGTQVKLSLERQGIAEPVEVEVTRGAIPIKSLEAAFMLPDSIGYIKLSQFAITSHNELITALNNLKAQGMKRLIFDLRGNPGGFLDQAIRIANEFLPADKLIVYTEDRNHNRTDEMSDGNGTIQELPLAVLIDEFSASSSEILAGALQDNDRGTIIGRRSFGKGLVQRQIPYPDGSALRLTVARYYTPTGRSIQKPYTNGDALGYEEDLWNRYRHNEFFSADSIHFNDSLRKVTPGGKVVYGGGGIMPDLFVPVDTTDVTRYFLEVSGRNILFRYTLEYADRHRDALNAVKTIPELQALLDADKELMNDFIRYAARNGVQPDYKDIARSRKLIEAQLRAYIGRNTPLNEAGFYVNIYPIDPVMLRAVEVLKTQNDHDMKQFYLLSTLLCALAISNPVSAQITIDEVKTDPSERILKNEVRPTTVDAQSYFSRARYRAERAAIRKERNTLEFGGGILGSVASYSDSWIETSGGDNSIGLAATLFLHHTFTKQRFTIETKFDAKFGYNRMNIEVAGDGGSTTSEATWYKNQDEFQISTNPAYIINKSWQVGSIIKFRSQFANGYVSRSQQTADDRKSTFMSPGYLDISGGFTYTCPLERFPIKINLSPIALSAVFVESAKVRSNRWDDKPGWQAYGLSNANKTSKYEGGSSIQIDFDRTFGKKGIFRYRTTLFSFMGWMSNLNMKNRYTSVSAYEKALQAWDDAQGIGDKPMLQIHPTVRWENTIDIKATKYLSTTFNFQLYYNRAQNYDIQTQLLLSVGLTYTFKNKMKYFGAHVSAAGGPENAPLNAHKIGATGFALFTKNQRQWSAPPLTPAQIAAFGENCRAGGYAPRSILPHDSYLINLGHPEREGLEKSRTAFIDEMSRCQALGLDRLNFHPGSHLNRISTEECLDRIAESINIALDRTQGVTAVIENTAGQGSNLGFRFEHLAYIIDKVEDKSRVGICIDTCHAFTAGYDLRTAAACDATFSELDRIVGLKYLRGMHLNDTLKTLGSHVDRHAPLGEGVLGIECFRYIARDSRFDDMPLILETPDESRWAEEIAELKRFSEEMREIQEIAFGSKNSREAGGWIIQYAGRHGYNAETINRFWNIYTMIDNEDTYMKKRLLLFAILFFGLCGCDKDNGEDVDPPGIGHFVWVNASDHRITMTVNGQFEDEIMLPGERISKTMIGFIALPPSPDLYVMHGIEIVFDDGPYGGVFTRPKEYPAAPYNPCNEKEYVWEDMPVENDLSHWVWTYTFTNADYDAAVARGPMTEQMPRPNLTANYRQRSNETSNIQQKSPAQRICAGDFDSKDFAVSAKRYCSVIGPRATAASMNTILRKQFLAHVGQTSPEPMMIEVARAEGVFFYTPEGKRYYDLVAGVSVSNVGHANPRVVEAVQRQAADYMHIMVYGEMIERPQVRYAARIAELLPGELSSVYFVNSGAEAIEGALKLAKRYTHRTELVSMRRAYHGSTQGAMSLMGEPEGEEWKGAFRPLLPDVRAIDFNDFDQLRLITRRTACVVVEPVQGEAGVRPPVPGWLEALRRRCDEVGALLVFDEIQTGMGRTGEMFAMCKYGVTPDIVCLAKAFGGGMPLGAFVSRKEIMDTLQTAPTLGHITTFGGHPVCCATGLAALEYLLETGTVEHVEGRGVLYESLLADHPQVVEIRRSGLLLAVELGSSAKMFRMMELFKEAGILSDWFLYCDTAFRISPPLTITEEEVRDSARLIRECLDRIMTNTANKPLDWYAERTAYLSEFMSEERRQVLQRTLNSRTRYMTILTENTYHAQNASALVRHCEAFGVQDIHTIETRCKFNPNVNIVRGTDKWIDLHRHRTTAEAIADLKGRGYRIVATTPHREDKTPETFDVAASPFVLVFGTEHAGISDEIVAAADEFLRIPMCGMVESLNVSASAAILIYMLSSRMRETVPDWRLTAGKRAEILYRWTFASVRDAEAILRRKYPEEMERQFTGTVIRTTGSWYDVRTNAGETVKCRIRGRLRLKGVRSTNPVVVGDRVVCERDEEDAGVICEVVPRRNYIIRRASNLSKESHIIAANLDRALLVVTLFSPVTAPEFIDRFLVTCEAYRVPVTILLAKADLAAQDPEAVAAFKATYESAGYSVLEVSALDGTGIEAVRELLKGHTTLLAGNSGVGKSTLAGTVEPGLDIRTGDISESHHKGRHTTTFSTMYPLSSGGYLIDTPGIKGFGLIDIADAELWHYFPEMMRLAPQCRFYNCTHVHEPGCAVREAVERGEISWQRYESYLKMLDDDDKYRKMSVIDLIVGLLMLWAVFNGWRQGLILQLCSLAGIVLGAWLGIRFGTEAGALLHLDEEFATAGGFLAVFVVVLIAVAIVGRLLRKVFHFAGFGIPDHLLGVAVSAAKTLLILGLLFSAFESLNKDHTLAEEKTLDRSVCYRPMIRLADSLFPLLEWAKEQVSIDEQELWSDNSPERMALLSPFAIFAENRMRLGKPGTSSRFLPAFTIFVEEKRGSDRLAKVVMTISYQEEIKFISNKIRELRKEKQMTVQELAYRCDMERSNMSRIESGRTNLTVKTMCIICNALNVNLRDIIRMKKTLFVKFLFLLLCGSVLTTAGCKDYDDDIDALRNDVEDLKGAVVELNGFENRIAALERTQAAFEAIDFSGFAKKSDISSLQTQIEGCVKDSDLAAKIVAAIESSLADGALQENLNSLKSGILEEIAGIYATQETLESVQETLENMIELKKDAAGFSLEVTQLIESYLSDNGFEAAGGELTDSQVSQIETAASQWIADAIKAELETAGSSINKWLGDELAVYMDQMTLGDNLLGQVSTQAIASVMEELDKEASALTEKIQGLIRENNGSLVISKDQLDQEFQNYLATLEANVGLLGSRIQSIVYLPDYVDGLIYFGNGEQYIVLSRENEVTHETEYRNLYLRPSAEGEQIATLRFRMTPARAVKKYANTEAMSLITEEVGTRAAAGFTIEEIKDIDQTTGEFTVVATTDYDYVSAEKAGKTQMVALHVDGSALSEGESNDFETDFTSAFIGTAYAKAGIQIPATNFVLARADAENEGEYVEYTDEVTTEVKYTDKEAHGVLAGYTVMYKDGETILPLVEAAEANNWTVDLAALVSASAEFTFSDSGSEELYAVDGKALTFAVAESETALIGQTVTAAATYALLDEEGFSLEVKAGAVNKFSIAPDGVELSTPKSEVMWTYAAATSDDTYEAKGLVLTPDKGMLSAVQYNALKNNENLVVELYRGTELVSEIVPSIELPATPTYDTDVQTVDLKLVGDLAQSAEYVVKAVYTNDDKTVVTITIPVSVTGIPEIPMLEQTLELPYNAASSTGHHVAVEEFRALLWESLDQTARAQFGEETFMQLSWTSDMAKDEAGNYATVGASGKNINFVFGKAAALNVSYTVKNLFTTADPVLTFEAVLHVTVTAPEIELLRGSSLSDDDRAQAVMKIEGSTLQIDAFDLSKTWYIAKDAPAEAKVVYATQAEGAVITDATLDWGTCDELSIVVTAQVMYGGKALGEPKTFTVSIADPIADATIAVETGKLVAKVDEDVTLDVATLLTLKAVNDVNVFDGSTNAQNTNTAVAATIEYGEAVVSIPDGRVKFDAERHVLTVVEGGDLELMKEITVTIPVKYVYTFGERTAQIVVNVTKMFLENASQKGWIEVICGSMFSGKTEELIRRLKRAEFARLRVEIFKPRIDVRYSEEEVVSHDASAIRSTPVDSAQNILLMTSDVDVVGIDEAQFFDQGLVEVCRQLADSGVRVIVAGLDMDFTGKPFGPMPALMATAEYVTKVHAICVRCGNLAHHSHRLTSDEKQVMLGAQDSYEPICRHCFAELRKKEREMAIFKVEGGRRLRGEITPQGAKNEALQILCATLLTQEKVIVHNVPQILDVIQLIELLQAMGVEVERLSEESYSFRAADIDPDYLRSDDYCRRASRLRGSVMLLGPMLARFGVGYMPKPGGDKIGRRRLDTHFIGFQKLGATLDFDTAAACSEVRCKELKGCYMLLDEASVTGTANIIMAAVMAKGFTTIYNAACEPYIQQLCLMLNRMGARISGIASNLLTIEGVRELHGTEHTLLPDMIEVGSFIGLAAMTRSELTIRNVSFENLGIIPAQFARLGIRFEQHGDDIYIPQQEHYRIENFMDGSIMTIADAPWPGLTPDLLSVFLVVATQAKGSVLIHQKMFESRLFFVDKLIDMGAQIILCDPHRATVIGHDHQMRLRATRMTSPDIRAGVALLIAAMSAEGTSTIQNIEQIDRGYKDIDGRLNALGARITRVEEMGEANLTANAAPDFPEYLPLFYKYSENRAAGQICPGRRGVFSIPMYFLFHNEGCKRKRQSHLCELARIAFCLLLQIYGIGRKSKRGKLKIRIGLINIIGRIHCPCFMAMKRTFQPSRRKRINKHGFRQRMATANGRKVLAARRAKGRKKLTVSDESTFKYAMCGVAPETKKKKNLRYFWQIKKKIIHLHSALYAKTIKTRMDIALAKRRENIAEYILYLWQIEDLLRALQFSPEAIYSQLIAPRGIEEGQRHNYLLWYMDIANLLREEGKEEKGHLEHTLHLIGDLNDLHLQLMKLPIGEHYRQTFARLEPELPRLRAVLGREMSDIELCFRALYAAMLYRIKGEGGKSAVSDTIEYVSPVIAELADMYGKVERGEADLFKDTAPERMSEIYTVIVVILGILAVSGLFVGVSNDAVNFLNSAIGSKAAPMKTILLVASIGILLGTVTSSGMMEVARNGMFNPGLFSFHEVMMLYMGVMFANVILLDLYNSMGLPTSTTVSLIFCLLGAAVAVSIYKISNDGALGMGDLNHFINTGRAMGIVSAILLSVVIAFTFGTLIMYISRLIFSFRYTAMFRRFGAFWCGASFTAILYFAVFKGLKTPLAGSAAIEWIDQHILLSLFLCWAVGSLLLFFLQRLKINILRLTILSGTFALALAFAGNDLVNFIGVPVAGFDAYSIARHAGDSTILMEGLNASVPANFLVLMTAGVIMIVTLWTSKKAMHVTETEISLSTQGESETQYGSSLFSRTIVRAALNASNAIDRTIPKRIRDKISSRFQYEDIEHSGAPYDMIRATVNLTTSAMLISVATSLKLPLSTTYVCFMVAMGSSLADKAWGRESAVYRISGVMTVVAGWFITAVGGFLIALAMGLILIYGGIAAFVVTTLLCGYMLVKSNFFKKNKAAETAAVKAAETGSDIIYNITQEVCATMERTTRIYDRTLIAVFKENRKVLREMVRESNELFYQSRERKYSLLPTLRKLQKGDIDTAHYYVQVVDYLNEMTKALAHITRPAFEHIDNNHEGLSKEQTEDLMHINDEVESIYRHINNMLRTGDFSDLDMVLEMRDRLFEAIADAIKSEVTRINENRSNTKASILYLTILNETKSMVLQSRNLLKSQRYFLEHKDGPLQWLNKIKMESFLRAFGFGVYYPDDPHTRTPGVWIDIPVHATVEGLHTGCDEILEKALEMVRTGEYDSAAEKMKNYSAKEIKNIVLIGAPGTGKTTLAEAMAFEGKVIDRRGSIEANNTLSDNTDIEHEYKRSIYSTILFTEFMERKLNIIDCPGSDDFCGSLFSAFKVADVGVMVFNAQNGWEVGSEIQARYARVLNKPLIAFVNQLDSDKASFDATLESIRAASRVKPVVVQYPVNPGPGFDAFIDVLLMKMYRFKDENGTREELDIPAEEAEKAQALNKELVEAAAEYDDALMELYFEKGTLTQDDIRSGLKIGVSRRAVMPVFCGSAKRDIGTKRLMEFIINVAPGPLKAPAFLSTEGEEIRADEAAPAVAFIFKSQIEQHIGEISYLRVIRGKLTEGMELLNTRTGNKEKLSQLFAVAGKNRIKVTELAAGDIGCTVKLKGTRTNDTLSAPGTPVTIDPIVFPEPRYRAAIKTKDQADDEKLGKLLNDAKYEDPTILVDYSKELKQTIIQGQGEHHLNILRSRIASENKLQYDYIAPKIPYRETITKVAQADYRHKKQSGGAGQFGEVHLLIEPYTEGMPEPKSYKVPGKGELAVNIKGKEEYDLPWGGKLQFYTAIVGGAIDARFMPAILKGIMEKMDEGPLTGSYARDIRVIVYDGKMHPVDSNEISFKLAARNAFKEAFRNAGPKIMEPIYDVEVLTPSDYMGAVMSDLQNRRAMIMGMESDKGFDRLNARVPLAELYRYSTTLSSLSSGAATYTMKFASYEQVPTDVQDKLLKAYTDTDEEMKRTIRLHISPCPNDTFMFDALVNGRIDCGELTFEVAYYDIEELNRRAEAGETDVSKISYALLPEIQSRYTLLDSGSALGRGNGPVFVARQGTPPDSIRRVAVPGMHTTANALMSRLYPSITQKKPVLFSEIAPAVARGEYDAGVLIHEGRFVYRKLGLELVADLGELWESRTGLPLPLGAIVARRTLPEELRCEIERLLRTSIEYAFAHREESRTYIKEHARELDDRVIDHHIDFFVNSYSLSLGDEGRRAVRELTGVEVMNKKWIIYIVLIVVAFVLIVVFSKNIYFWLSNQLWKILLLAAVFGGGWLLGRFGGKKNGTQQGNGNMRTLILIPTETEAAPLRAACPDAPVRIAGVGMAAAAAATARIIAEEHPDRLILAGIAGASDRSVAVCEVVAVAGERIAELPGKYAVRYAADFIPAGLRTVESNTTNRTGVAASGTQIENMEGAAFLAVCRAFGVPGAEVRAVSNYTDDPRSAWRIEESAEKLAKTIIRILSDYEMFAKEIYIRRRSALCGKMGSGLILIPGNMLTPNNYLNNAYYFRQDSSFLYYFGLNTPALVGLIDADSGEVALYGDDFTVEDIIWTGPQPSLREQGAEAGVSNTFPLADLKTHLTKAIVQGRRIHYLPPYRGETKLLLADLLGLKPAALHDHKSVELMMAVAEMREKKGPEEIEELEKSFHIGYAMHTTAMKMCRPGIVEREIAGTIEGISKAFGRGVSFPPIVSQHGETLHNLHSDGVLQNGRLLLCDAGAEGLSYYCSDHTRTYPVSGKFTQKQKDIYNIVLAAHDRVAAMIAPHMPYMDIHNASYRILAEGLISLGLMRGTAEDAVAAGAMTLFMPHGLGHGMGLDVHDCEAIGERSFDFSEIAEQAAKSGTCIQRSTWRIEPGTVMTDEPGIYFIPALIDKCKAEGKYKGIVDYDALDAYRDFGGIRIEDDIIVTETGSRMIGGDKRIPITVDELEAVVGRMPERTPFEPNFGKGSENEDRIEQIRSFFMSSASYLSVKVVKKSVIRVIKRLLVTFYMGDGTQGTGSAAGSSVKMERILDDLLKKILYLSHWSVVTKKIPVRGILMMKKIFCLTILAVLCTFGVASAQQFPSVQIETQDGKTIDTKTLIDGKTPVIISFWSTTCKPCIKELDAISEQMIDWLDEADFRVVAVSVDDSRSISRAKALAASRGWTTDLMVAYDKNQDFKRALNVNVTPHVFIFDKDGKMVYSHTSYLPGGEMELIQKIKTLQMKRLLRITVLFSVTLLWWGEKGYAATPAMDAAEKETVSATVEAEADKKDPKSDKKSDEPKRKRNLGHLSGSFETNTIYYVEDSKTGAVVPHNSYGSNNFLKLDYQLGRFSAGVQLEYYPHPLVGTPMQGYEYVMEGFSINNLTEKYISWTDRNYSVTVGDFYEQFGSGLILRAWEDRALGFNNSLGGARVTFNITGHVQYQGHRGRMEGKVLYAFPRFNLGYLSTQIAGGDLSFSLSNAIGLLDHRLSLEGSIVNRHFKNLPSWYTEYRDDYDFDLSKNVISYSGRVNYEYRGLSAKFEYVGKSKDVYLDNMTGEEVFKRGDAQLFEIGYTGSNYAVMAQFRRLNYMQSQLYRPDGGSGSLGLLPGNTINYIPALSPQHTYMLAGLDPNSPQQNGEIGGQIDAFYTFRRGTAIGGKRGLKIHANYARYYSINGTMSKPGTNFYYRDFSFDIDKSWNSKLRTVLFVSLQKNAMHGGEDVIRQNVFVADVTYKFTPKFSLRAELQYLYAPHAEGSKEVDGDWVAGLLEASFAPKWSIFVQDMYNHGGSEINYYSAGASFTHSFIRIALSYGRNRAGYICSGGVCREMPAYTGGNLAMTLTFMRGHILPVIRHHESHVAFTGDKRRSARRQHQFAGRSLRIIVAARCESRQRERRNAGDEIVENLVRPFIISVILVDFSLSMVTYDGEDVTSQAAITNVTTGEPVENAAWTTTEIGEYKFQAVYDSYTSDPVTVSAIDKNKDKDKEFYRYVLLLKFTYMTCGNCVTAQGYFDALDEADRDHFLVVAAHQPEGMPMDPYWCSEGISLKSKMKVGVYPTWSYNFEDLVVGIGAGAISKTSIRQQISHAEKTYPAVCGVKATSTLEGSTAKIEATVQFQQAGNYKIACVLVENNIENKETYNTFNHVLRAAQTDMEGDAVTPAVTAPEERTFNFEATIGEDWSAENCAFVVYVFKEEANGKYIVNNGAECTVDGSVDYRYELMKWHFNFFRFAVMCAAFVALAGFMACSDDDSESGSELVLSASTSSLAGGGQRDIYGGFMTFTVAFEDRDVTAEAVIKNVTSGSEVQNATWTTNVAGTYEFQAAYDGMLSNVVSVKVESDSESDAFYRHVLLTKFTATWCGPCAQAQRYFEQLKPEESERFLVVAAHQGDRLTVPVGSALGAKLGYQYVPTWNYDFRTVFESVGTGGITATSIRNQIKSAMEEYPAVCGVKAESELDGQTAKIRATVRFQQAGNYKIACVLTENDIQKTNNETLPVFNHVLRAALTNMEGDPIAPAVAEAGERSFDFEVSLNNGWDSQNCEFVIYVFKEEEDAAFVVNNGAVCPVGGKVDYKYESVKMSEIEIKQMQEKINAGILLARKRLIEKVKKEDGELVVVRDGKIVRLKAKDLKMPKLYIIAGCNGAGKTTASYTVLPEMLGCKEFVNADEIAKGLSPFNPESVAIEAGRLMLQRMDDLLSEGSDFAFETTLSTRSYVKFIERAQAKGYFVTLLYFWLPTPEQAIERVATRVREGGHNIPSDVIRRRYANGIKNLTALYIPLCNYWAIYDNSSADEQIRIIALGGKDITTHIEDTLSYKTIADYERNMKMEGMSETVNLFDCLVRANTILFHYTTPDGRDEMVKFPLAGFCENYLMQFAKMVEWSKTEGIGLIVIKPQNEIYPEIFYFVFSPETADINKPVEIALVKNKQMVIHSVLGCLYLFILAKIYIVIYLYKDKIISEINKTRKMKKLLAFAALFAVVALTSCKYDDDDLWNSVHGLENRVAKLEELCKQMNTNISSLQTIVTALQNNVYVTGTTPLMKDGKEIGYTITFSKGNPITIYHGKDGQDGEDGITPTISVKKDTDGVYYWTLNGEFIVVDGGKIQAEGTNGTNGTTPQFKIENDYWFVSYDNGANWTQLGKATGEDGVGGDSMFSGVDYETSTDYVIFTLSNGTQIKLPTWSAFEALQRLCNETNTNLSALQTIVTALQNNDYITSVDPLTENGKVVGYTIKFAKSNPIVIYNGKDGADGNTPVIGVKKDTDGIYYWTLDGEFIVADGQKIKAQGTDGNNGADGSDGVTPKLEIREGYWWISYDNGTNWTQLGKATGEDGKDADSIKITQDENNVYFELADGTIITISKTGQSSNFITFEDINVKLVCLKNWDTNGDGELSYEEAAAVTSIGTLFKENTDIISFKELEYFTNLTAIDDNAFYHCDNLVSIVIPKNVKTIGKSVFYPNITGIGPGRPESISHSSLASIILPDGLISIGANAFFSCANLSNITIPQSVLTIEDFAFTISKKLTSVTVTNGTIGKSAFSFCDNLVNVTIGNGVTEIGQSAFASCYDLNFYCKSLTPPTLGDDALYKPVKIYVPHSVVDKYKTKTNWRNYADSIIGYDFSEVLKNQSTVIEEMIRANLISEEYLYPFADDVMEWWLIDSWLAERLKEQGEVIIEEYGCYWWGRQSSGQAIYMDGVIQEICGEDMLFLSAIYCNAGSTSGVQVTEAVLTSPSTVVQRVLKNQSTVIEEMIRANLISEEYLYPFVDDVMEWWLIDSWLAERLKEQGEVIIEEYGCFWWGRQSSGQAIYMDGVIQEICGNDMGKTININNLSKEEINSFYDFVCDYELNIKNKYGNYNLNDTKLIAFCATNHIALKNKRSKLPYLFWFSTHQDKRTKINDKAHHLMRHIRNAFAHGLIKKEGKNFTFQDYSTIGTQTMGGHIRCDLFWAMLDLLKHTKLMKKLLSLLMCGLLLFGCGDKYDDSALRNDLNDLENRVAKLEELCKQMNTNISSLQKIVEALQDNLSISKVEQISDGYIIHFSDGSTATIKNGKNSEDAPIIGVKKDTDGIYYWTLDGEWLTDEKGNKVKAQGTDGKDGVDGEDGTNGKDGITPQLKIENGRWMLSMDNGKTWTDIGQATGADGTDGEDGVDGKDGTNGIFKSVTEDNDNVYFTLEDDSVITIPKSDNSKFAIAFDTTDIAILNGGESKTISYTITDATKNTVVKAIAQDGWKVKVDATSTDKGTITITAPNPIVESEILVFANDGSYRTVMVSLNCMQGQINIADNSINATSAGGTQEIKLTTNLDYTIEIPEDAQSWLSLAPETRALREDTIVFEVTANEGMQRYTTVALKDEQGKILQTIIFRQLGTCTEVHVETKGELENELAGYDYANIESLKITGVLNDVDFLFIYRMMPNLKNLDIAEVNITALPIQAFYKSTNVENLILPNTLITIGEEMFYQSKLKTVVIPANATTIGNSAFEQCASLISIDIPANVETIGTAVFWGCSSLATVTFENGSQLKTIGGDSSYYGAFSYCTALTSIEIPASVETIEAAAFKGCSSLATVTFENGSQLKTIGGGSSYYGAFSDCTALTSIEIPASVETIKASAFKGCSSLATVTFENGSQLKTIEGGYPSSGTFADCTALTSIEIPASVETIEAAAFKGCSSLATVTFEKGSQLKTIGGGGSSYYGAFGQLKNLMTVDMSACTQVKTIGESAFDGDSELRLFKIGTETPPTCGRDAFSGINPYSVLKVPSGCADAYKAKSGWNNFASITGLDEMENKSKNTSEISQWIDNYLHISLDTEEYVEVRNFLILWNLFEAKWFKCNFGRNKRNIQNIHLTSDIFNQTLQYLQRRYITNGSTNERFMRLRLRNNDDTTSIQRVLLGLTNNSCDIIKAIIMIIYRYRNNLFHGEKAIASLPMQKDNFINANKFLIACLEATKMTDFVKRLIYKTLLQSLSLFRFVYFTNNLIFIKINNNMKMEGMSETVNLFDCLVRANTILFHYTTPDGRDEMVKFPLAGFCENYLMQFAKMNLPYCVNQRVNRAEQQHEKEKLIDKIHYRNYLLINIALHLHSQFGAVAMIGRRYGRIPYGFYGRTEIFPGVSRREYKAEKERIGNCAMVVQPKTKSDLSKNRSLHYFVTPTGLKPVTFMCPLTLPAIYFMQSKVLTQQAQCDSGFNRSKYTIPKKIELAFFSNLMGEIQHNMIFKLVKEERTITNIIKRIDFANFTDLLNCIFMLSRWLTRSRSRGGDDADFVSIESSEEKTVEITDLTPETSYKLTAIAYNADQRPSNPATATFTTPEKPTTPDPDKATISIEEVKATYNSVTFTLKTANAARFGYKVDVPDGTAELTFVNGSEGGTYTTDNLEAATDYQITAVAYDENGQAADPVTHAFKTEALPTGPAVVSIEEVATTHSSIRFTLKLDNAVRIAYKVDVPDGTAEMTVVEKPQQSTFLVGSLQAETDYVLTVVAYNGKDEPSEPATHSFTTPAYTAFARIDAVATAHGIYLKADVDTGKFPLYFLKIFDPDLTESSADFEEHFKVDSREQFIHYLEVASLTAGLKTASFEEWNKTLLSTRSQQVLLYAAPVVRQGVDVVCEDYGEIIEIPLTIPARDELGAGQAAVTLGEPQVAGKELEIALTKQDGVVSYYAGYATKSDVEAAGTPEQFVQAGLDAKTYDYDITADFQGTWKTDRLSPGSEYYFFSFAYDAEGKLGPLQYKEFHTEAAGTDYDTSLTVDIALKTASFTSATFSVKRNGFEKAYYNFITKADFDRKYGGNADTYVQRELIGKESGYPITLYSDNDINGSRLAYDTQYVLIALPEADNEDRYGVPTVVEFETLGYEATGSATATIAVNSITDNYGVSFYASVTVTPGADCAGYYYAMIEKTAYDAAANLGETICKQNGVKYRAATEDTTFSTDYYFAESYLVLIPVDNNGKMSAPVTSELLTTSAKMKSLSKATFHLLCCILLLGTFQSCKDDETTPPPPGESATLTISDVKAEANTVTFTITPKNVDVYTYTIKSATVTPQATVQDPAETKTFTYNSLLPSSDYTIVATGFTQGGLELTSTEYKFRTLDTQDPGLEVPSGEEPFIEYGDQRIAAKSVFFYKETDRLWFFISPLEGYDNYQDMLYGNGGKNDYISLSFTPNQLNKSINMKSASERYSLLNSMSFQHPIASDISMVTIDYHSLITDGGFIVTRDGDKIEGYAEMTSAATGKKLRIYGTCTYDQQDAERTSFISLNDLKTPLGSAYYQPLEEETISEIHLSPASPVMGALIDQVDEYYVRIRFDNALATAKTPIDITRIDKLFELEIVDPAQQKSVTVTNTDLQGATGTITLYKYALQDNYRISFDLQVHDMHLEGYADGAFELYSYYSGNSYTVGTNDPVELQSAVIDRRSDDYYTIYLAPQAGLTDLEQIRQAEGVVTIKAAPQALDGLLVSFANEKDAGRILSIAYAGKTYDNQGDNTKSTIHGATAKQKIALAFYEATNEMNGYYCGPFVDVQMIKKELLLGDEAIAWGALNAGLSGVYAYPGTPSTEITEFIQMHPLTRERGIHCNWSANEKTALEAALGMSFVGKRALVCMKHVGMNVCADAFVNSAMTGANGGLVVVAADDPSMHSSQNEQDSRFYAKFAMIPCFEPASQQEAYEMIGEAFDFSEKYQIPVLMRVTTRMAHSRAVVEIGEPRQQNTLHYPERPRQWILMPGNSRVRYKTLIEENKLFEQEAEHSRHNRYIDGPDKSMGIIACGLAYNYIMENFPEGCPFPVLKISQYPLPTALVQRMASECRSLLIVEEGQPLVEEMIRGLLGTPIPVKGRLSGELPRTGELTPDNVRGALGLPRRESEAASQLTMPRPPALCQGCGHRDVYTALNDVLREHYPDHKVFSDIGCYTLGSLPPFRAIDTCVEMGASVTMAKGAADGGQFPSVAVIGDSTFTHSGMTALLDAVNEKSNITVVISDNLTTGMTGGQDSAGTGRLEQICAGLGVEPEHIRVVVPLPKNMEEIRRTIREEIEYKGVSVIIPRRECIQTAKRHNAKKQMKRDIILSGVGGQGILSIATVIGAAALKEGLHIKQAEVHGMSQRGGDVQSNLRISSDEILSDLIPQGAADIIISLEPMEALRYVPYLNPEGWVIANTTPFVNIDNYPEPEAVLAELGKRKHAILIDVDAIAKEQSSPRAANIVLLGAAAPFLGLDADKFEAGIRSIFARKGEQIVEMNLKAFRAGYEYAQKHRKMAALIPQKMFDEQLAAMDIENFAQATIRQVGAVGGALEKNSGTEFLHLEMGVPGLPPETVGVEAEQQALAQGHASIYPSITGIAPLKSEASRFVKAFLDIDVAPEGCIPTVGSMQGGFCLFQISSQCDPKKDTILFIDPGFPVQRQQVRILGIKHESFDIYDFRAEKLGPKLESYLKQGNVAAIIYSNPNNPAWICLTESELRTIGELANKYDTIVLEDLAYMGMDFRKELGHPFQAPFQATAARYTDNYVLMISGSKIFSYAGQRIAIAAISDKLRNRFYPALKERYGIGRFAESYALTFLYAASSGASHSAQYALAAMFKAAADGKLDFVGHTREYAHRAHRVKELFERHGFHIVYDKDQDEHVSDGFFFTVGYGSMPSSDLVAALLRYGICAISLTSTGSLQNGVRVCVSQMNREEQYDLLDRRLRDFAQDYARKMQLRVAVKSSRSCTPEKRIRHGHPGTTIRTQRREGAEMINYTTAAEAAKLIKSNDSVYIQGSVSIPEVLVKAMADRGHELRGVKVYSAFAIGREEAPYCKPEYKDSFLVYSLFVSNSVRNWIAQGYGQAIPAFLGEIPGLFRKGIIPIDVALLNCSRPNADGYCSFGTSADLAVSAAECAKVVIAQINPHVPFSYGDALIHVSKLTAAVEVDEPLVELPTAQPSEIDRKIGGYIAELIPDGATLQIGVGGIPNAVLAALGDHKHLGLHTEALTDGVVPLIRSGVIDNSQKKVLPGKNLASLALGSKRLYEYMDYNEDLIMKDVAWTNDPFRIRENPKVMAINSALEVDLTGQICADSIGTMIYSSVGGQHDFMYGGALSEGGKTFIALPSTTSKGHSKIKALLTPGAGVVTTRFQTQYVVTEYGAAYLLGKGLAERARALIDIAHPSAREELEKAACERFGYSFLRLKMQESFAGTCPLRAEMIFTQDPYIIKYIKKDSCRNRNNRVCGITKDRPASFFRGWDGLFSTQNPPLDRSIGGGMIVLENINKTYHNGAPLHVLKGIDLEIGKGELVSIMGASGSGKSTLLNILGILDDYDTGEYFLNGRLIKHLSETQAAAARNNMIGYIFQSFNLINYKNAVENVALPLYYQGVSRRKRNAEALEYLDRLGLRDWAHHMPNEMSGGQKQRVAIARALINKPQIILADEPTGALDSKTSQEVMDLLRQVNGTGMTIICVTHEQSIADQTDKIIHLKDGVIGSIQNLRPMRELLLEIWASIRRNKLRTFLTGFSVAWGIFMLVILLGSGNGLKNGTLSNFGSMAVNSVIINGGWTSQPYKGYDKWRRINITNRDLEILRTEFPEVDKVSARVQGPGQYNLSHGRDFLNNAAVVGSDPEYREIMNVRVLDGRFLNDTDLRERRKVIVVDKNVRDVLFHGQSPVGQHLLVNGTSYSIIGVFEMDQFGSYTFTFIPLTTAQLLFNHSDPSVGQTYLSVKDIDTDQKMAEFEQRLRNRLAAEHTFAPDDESAVWIYNRMEGYKNMMLVFGGINLFIWIIGLGTLLAGIVGVSNIMLVTVQERTFEFGIRKALGAKPSSIIRLILTESVMITAAFGYIGMVLGVFAMEGVNKLMTQTPPGEENTFNIFVNPTLNLSVAVSATIVLVLAGLIAGYIPSRRAARLKTVDALRHNKMSRNYDRQKRRYEKDNSKIRNQTMTGFFDTDRWNEIWQTISRNRRRSIMTALGVFWGIFMLIVLLGAGTGLGRMFRAQLGGTATNAIFIMSDRTSVPYEGMPTGRSWELDWDDLEALRKLPRIEYISAICWGNQRNMSHQDHKGEFGLMGYSPDMQQIAPQQILMGRYLNEVDELRQRKVCVIGLQVWRDLFPGGEDPTGKTIQIGSSYFTVVGVTKPLGGMMAFSDPERTVVIPALLVQQMYGLGRTIDMLALTGYADEPTQEVIQDCRQSIAARHLIAPDDKKAIYFQDTSEVFGKIMGLFRGISLLTWIVGLGTLLAGIVGISNIMLVLVRERTQEIGIRRAIGASPLTILSQILSESFILTFIAGIFGFGAGVGVLSIADSFYARAAQMDQHLPDISWQISFGMGMLALGILVLGSLLAGIIPATRALRIKAVDAIREEMKKFLKIFLGILFLALLVGTFVFLWNKTRPVKVVYTLATPVHDTIRQYVIASGKVEPRDEVLIKPQISGIISEVLCKAGDRVKQGDVIATVKVIPEMGTLNAAESRVTVARLSLDQTRKEFERTEALYAKGVVSQEEFEKGQTTLRQAEEEFQNAEDNLEIVKTGITNRYKDLSNTQIRSTITGMILDVPIKVGNSVIQANTFNDGTTIATVADMGDMLFRGNVDETDIGRLHAGMPVVLTIGAMQGTVLQATLEYISPKAADVNGIIMFEVKAAAKIPESVFVRAGYSANASIVTDSREGVLTLPESTIQFEEGKPCVYILTSPEESPEQTFEKRDVTLGLSDGVNIEIVSGVTETDKVRNLQQQSIMKFGTLFIALLLAGSTAQAQIPTPTPEADPWSLDDCIRYAHEHNIQIQQQALQVEQRSVELNTSRHSRLPDLGANLGTNFSFGRSLISNNTYADNNQVSGSLGVSASLPVFMGGRINHEIAAGKLSLKAAVQDLDRIREDVSVNIMSYYLDVLVAKELVNVAEQALALSTQQVERSREQVRTGKVAESVLYENEALLAADEYKLTQSRNDLSLSLLALSQALNRTSAEGFDIVAPTFDSLTVESMRHLRNPAEVLSYALDNRPRIQAERFRLEQALRAVRMSRAAYYPQITLTGGYGTNVYHSFATGAVNPAFGRQFRNNSTEYVGVAINIPIFNRMATRNSVRTAKLGVRSQQLVLTEAEQTLQKEIETAYYQADAALLKYRSAEKALNSAQVAFRYEAEKYAAGRSTTFDYNDAKTRMQKAESDQIQAKYEFIFRTKILDFYAGFPLTLMALAALLTTACNKDEVILDDRDHAPVITLDSESGVYTVKTGRELTIAPTVEYAEGATYSWIVDGKLAGSEPTYTAVFTELGEVYITFRVETAAGKAEAELRVDVLELTPPVISLALPAEGLKVLPGVEYTFAPDIQHSDQEDFRCRWLCAGEVVSTQMSYTFREETVGSYPIRIEASNDDGTSVKEFVVEVVEKMPSEVRFEKLSHYCKTTDRSTFVGRAVYLAPSLAYVADPQFAWSVDGEPVAAETGAVFKFTPDGPGDYTVRVDVTEGGDASERLTRNIVRGVVTLSAEIVVHAFADEEQRRRPASAASSRFQNAVYEFLPAPGQLVGEKTEAGYTGNERTHEDAVAYAAGRLEARSYVSLGGFGGYLIVGFDHSIARMESGYDFSIQGNAFDTSSEPGVVWVMQDVNGNGEPDDEWYELRGSETGKEGTVSGYAVTYYRPAGRGMDVQWTDSEGRSGTVEYRGEFHDQDFYYPAWAADTYTLRGTLLESRNMVDDRGFWINRPYEWGYADNYGSDCLAGGDAMDGKGQSNGFRIANAMQPDGTPVELKYIDFVKVQVGVNAKSGPLGEVSTEVFSFADLSIAEMKKRVFLALLAAAAVTFVGCSKDDDGPDEGPQTYTITFEGDDWSPLVVANYNGGKAMSVVYEDKAYTWTDQTTQLTSPCPEGWGYPFMVSSYNSKDIEKFNSYELDLYLYNARNEDATTGGGHDGSDNFLIGYGNYDEAHPDYGDSRPIFAFADGVARTIQSCYINSTCYFLSVAAKGNALAPALEEGQDVLIHATGYDAAGKETGTVTMTFASKDKLIKEWTKWDLSSLGKVAKVRFNMTGGPDNGYGFSMPAYYALDDITIELMAKESDRTIPRKETGLTAASTVPDSHRIPYYSARFEKTYGYLLRVQIYEMPRGRNKALIARRDEMLCHRYHYWTETQRLRFDDTLKILSEEEFFLSEERILTILRANGDTLRELAGRPTPKMRRERFPTRRHTPSPRKMDWFTDLFTQHSAIQAVVVLSLISVFGMMLGKVRFFGISLGVTFVFFIGIAAGHFGLSVDPSMLAFAESFGLVLFVYALGLQVGPGFFSSLRSGGIRLVSLATLIVLTGSALAVGLGYATRVPMSDMAGILCGATTNTPALGAAQQMLSQMQLDSNNATLGCALTYPLGVVGVILGIIAVRKLFARPSDIPQPDAEHKKNIFIVEFKISNPGVVGKSIRDVAAYSHHHFVISRLWRAGQVSIPTSDSTLESGDLVLVITSPDDVQALELLFGERVQKDWNTHDIDWNALDSQLISRSIIVTRPEINGRKLSSLRLRNLYGINISRVHRSGVQLLATPDLTLQLGDSLTVVGEAQAIEGVEKILGNAVKQLDEPNLIPVFIGLLLGLLLGSIPFAVPGISLPVKLGLAGGPIILGILIGTFGPRIHIVTYTTLSANLMLRALGLSLYLACLGLEAGAHFVETIMRPEGMLWIGLGFLLTFVPIVIVAALSLRFFKLDFGQVAGIMCGSMANPMALNYANDSIPGDHPAVAYATVYPVCMFLRVIIIQILIMCFIMKCADNREELFPVVDAAGRVVGRATRGECHGGSMLLHPVVHLHLFNSCGELYLQKRPAWKDIQPGRWDTAVGGHVDWGEEPLAALRREVREEVGVTDFEPQHVLTYLFESERERELVYVYKTVYDGPVVPSGELDGGRFWTLREIAEGVGGGIFTPNFEGEIRRVAELPDVGRMKKSLIALAFGTLALGMAEFVMMGILPDVARDLGVSIPRAGDLISAYAIGVCVGAPATVLIARKRALKGILLALAALIVLGNVCASLAPDFWMLLAMRFVSGLPHGAFFGVGSIVAERVADPGHKTQAVSIMILGMTVANLFCVPLGTYLGSYLSWRLAFGMVGLWGIMALLLIARWVPALPALPDTGLKGQFRFLGSRAPWLILLATLLANGGVFCWYSYVTPTMTRVAGISGQAMTAVMMVAGLGMLVGNLAGGHLSDRFSPERVARFIQGMICLLLVGIFFAARIDWLVIPLMFLTTASLFGVSSPQQLLILENAPGGEMLGAASIQIAFNLGNALGAYFGGLPISFGLGPQYAALPGAAMALLGFVMFSVYCSLYGRNKTHRILSEDEMRGMRYFCSPNQKTVLRTRRIVELRSGPKNAKVAKEIPYSGVRSRRMPKGLRKIVCALLVAGVAGGVILAGNRPLAVPVAGVQTPSAPGAPAQDPESNKVVDFVADRGYPIPYGDTTATVLVGHFAAQHNGAVITCDSAIRYNDKRIECFGNVLINKKETYIYGDRADYNGEINEARVYAPLVKVVDGDATLYTYDFRFNTLDNIGTFSGGGMLTNRENHLESDRGYYYADTHQIICVDRVEMRNDKYELKGDSVVYDTDTDQAHFFERTNIWNEGGDYIYADRGRYEKPRELYVLTRNGYVMTEKQELWSDSLDYYRESGHALLFRNIQIDDAEHKVLAFGDYGEYWKEPGNALLTQRPSVVSYDTSQSDSLYMCADSMFLYTISKSEQARADSLAKVKAKAADSLAGSKGGSSVDSLAAKPSAADPKASQDGSQADAAAPQAAAGAVETSSETADAGSGSAAEPIAAVPAEKGGTGGDSLDAAPAIDTLLSDSLDRVGGGMTPADSVAAVSAVDTLFSDSLAQAGPKSLPADSSVHILSKRERKAQADSLKAQLRAQADSIASVKKAQAAAARKEKLAQIAKARQARATAKLDAAKQKEEALRRKNLERRAERMEKIWAKRRAKTGKAILKGKLPASALDSLVADSLREARAFAALDSLFRDSLAADSLGRDSMQLDSLKAGVAAADSLRGDSIAAPAGDSLYRLVKGYRRVKIFRNDFQAVCDSLVAVSTDSMILLYIDPVLWNQDNQITSDVMKIYTENSKLQKAEFVGRPVMSSEIDTMTYNQVTGKLITAYFRNNKIYRNDVDGNVQTIYYMQEDDSPEPVGLMSIQSGAATYYIDNNTVEGITYRNQPVYSIFPMDKIPETQALFLEDFKWEGHRRPALREVFDRTIRPSERAEKSALPRPDFPITRRIEEYKKLLIESGTWVDRDDKLTPEALEWLHWLGYMSKKILFCAALVLAIFAGAAQKRQVMLDRVVAVVGGSSILWSEVDEYAGELVEQRRQQGYTSDRDPHDEALEQLLMQKLLFNQALIDSVDVSYSGIAQRVEAHLQALIDDAGSIAALETKQHMPIFNVREMLRQRYEEQAYAQAMQSSVVGKIKVIPGEVERYYKKTDPDSLPTIPEQYVYAQITRFPASIKEAKQRTKERLLDMRERIIKGQTRFDIMARMYSMDGSAISGGELDPQPLDGFVRQFADALADLKPGQVSEVVETQYGYHLIQLIDQKGRMYHARHIVLRPSYTLEELAAPARMLDSIANLIRKDSITFEEAARKFSDDDNSKMNGGVVTNHDLLELTQRWEASYTETRFMKEDFGRAGGKSLDDYNALRNLKEGEISDAYQTEDWMGNQLSKIVKLVKVIPPHKVSLDEDYIRVEQLALNAKREKVFKEWLDKKIEGMYIYIDPEFRDGEFENKNWVKMSFCAKIGAVLLLVLAVGCQEVPRYWGGGRVVLAEAAGRKLYAREVKAAIPKGVVGEDSVAFVNRYVEKWVHKQLKLHEAEELFSDAEQDIDSLVEEYRQALLIRKFDQHLIEERIDTLVTADQIAAYHREHASDFKVNQTLVKGRIVRFDANNRQAPKLRKLMTQPGSSRQQEFADICTKNNFVLNDFSSSWVTFSEFLGYLPTLRNQSYDALLSSRAVQEMSDGHSRYYFEISDVLRPGDPEPLERSEAIVRRILYNQRQNEIIRAYDEEVYRKAVEEGRVKIHEEEKIENMQKYCLCRFSPDYLHRSIRFFRYDKLGRNVIFGMHGTLGSGKKYLFMVHTDSTTPSDVRPQAPVGDTPGTSDRGQTPQPAHKYRFPTLIDLLALVGIWYLLQFVGLLAARLAGFDFPDWDLLRGNVAPTPEQQDALARFTAFTYLVTMGLMILFTLFYRRLRHGTRKTLRFSARGLNPVLLLWGLVMMLAAGIVIEPVVELLPMPSSAVYGRGFWAIITLVVMAPLLEEFLCRGIILESVRAKYGVVAALFLSSAFFAVLHGHPALAVNAFVMGLILGFIYIETNSIFSVVLLHAMNNGAAFLLIMVGLDGATIRSVIGSDTLYTIVYVVALVLFAASGYMIYRLLARVKKLDKNTIRMAKVIALANQKGGVGKTTTAINLSASLALLGKKVLLLDADPQANATSGLGFDINLEGIYECITGAKTAADVILQSPDVKNLWLLPSSIDLVAADTELPKMENGHHVIRRIVESVRDRYDYILIDCSPSLGYTTVNILTAADTVLIPVQCEYLALEGLSKLLNTIRIVKNGLNPALEIEGFVLTMYMRNRLNNQVVNEVRNHFGELAFDTIIQRNIRLGEAPSHGKPVILYDASAVGSANYLTLAKELLKRNRKSNQKAKMKQKGLGRGLDAIFGSEHLDARLKPMTEMAEISVSAIFPNPTQPRTEFDEEALEELADSIRTLGVIQPITVKRTDDGRYLIISGERRWRAARKAGLESLPAYIREVDDENLHAMALVENIQREDLNAIEIALGMQRLIDECNLTQEALSEKVGKKRSTVSNYMRLLKLPNEVQLALKEGLISMGHAKAIAGAPEELQLRLLKKCIRKGLSVRQIEELVRALTDPAAKPAAPAEDEEYPESYARLVEQLEKFFSQEISIKRSKNGGGRIVIDFSDDRDIDRFIEKFEKRGASAEIRNNKMKHTRGYIRLLVLFAFLALCGAGEASAQVPLDRYRSAKTFVRSGLMPKPDSLAKNHLTDSLLLMRVDSLLQDSTLRDSLLRSGIDSLRLRDSLAARLHPQFVPDSALLLKTDSLPAALGAPDSLAGRKDLRPRRDTISLSGVSWISLVAPGFGQIYNKQYWKLPILYGTVGAGLTLFFHENNTYKPLKRQYNALLENGTARTEELDDVQSRMIRSNTRRQIYLGLTVASYLYFLGDAAVNYRYDASPVKKATTLATIFPGAGQVYNKSYWKLPFVVGGLATTIYTIDWNNRGYKRFKKAYSDRSAYDKALEEHQKDPEHHPDPPVAKGEFGTKYSAEFLKNLKDNYRRNRDLCIIITAGLYVLQIIDAHVDAHLKSYDISDDLSVEFTPAVNYVYSPTVGGHRPTFGFNFNLNFMRKILACTLFLSILLGCATATAQSRKERRAKRKAKTEKQASKSTHTPVSVKPEKTVTEKTTVQQTEPYCPELNRNLTPAQIDSLVALWREKQTLQSYDTFFNDYIDIDSLASSSDTTPDSVYANRLRALVSPVQLPFNPIVKNYIRRYVDTRYGTINRVLSLSRYYFPLIEEELIKADLPVELRALPIIESALSTTATSPMGAVGLWQFMPATGKSYGLEINSFVDERRDPVQATRAACRYLKDLYSIYHDWTLAIAAYNCGPGNVNKALARAGGGTTFWDIYEYLPRETRGYVPAFVGASYAYAYHQQHGIQSENPPMPLATDTIRVTRLLHLGQVASTLDIPIETLRTLNPQYKMDIIPATIKSYTLVLPQHYLCQYIASEEEIHRKDSTYLKEYINPANIEKKKLADATPAYTTYTVKRGDTLGAIARRYRTTTAQIMKLNKLKNANKLREGQRLRIPIRRMNTSTDTIVAPATASGGAIAVIRLSGPEAIACCDRIFRGRKPLAEAAGHTLHYGEVIDGDRTIDDVVAAIYRAPHSYTGEDAVELSCHGSPYIVSEIIALLLRSGARMAQPGEFTIRAFLAGRMDLAQAEAVADLIASDSRASHAMASTQMRGGYSAALGALRDELLQLASLLELELDFSEEDVQFADRARLREMMHRIESEITRLTDSFRLGNTIKKGVAVAIVGEPNVGKSTLLNRLLGEERALVSDIAGTTRDTIEETLNIDGVLFRFIDTAGLHDTADRLEQMGIDRTQEMIRRAQIVLQVVDATCPIPPAIQITSEQTRLLIVNKCDSPDARITESKVSSGCGIEYRVSSANPDTLFISAKTGEGIERLLARLRATFDTGSIYDGDPVISNSRHLEALRQALDALHRALTALDDDRSADLLSEDIRQVIHHLGTITGEITNDDILSQIFSKFCIGKMATSKMKTKKVCEWCGTTFYAQKLTTRFCSHRCNNLAYKETVRQKRIQEVETKVQTIISEQPISDFKDKEYLSFKEAATLLGLSKQAVYKMVYAGKLQAFRISSRLSFIRKKDIDRMVEARPYEQRHPKDTIPITDFYTTAEVKEKYHVNESWIFLVAKKNNIPRTFNRGKTYWSKKHMDAYFTKKAPNPDITEWYSTQEMQEKFDMTLSAIYTFVSKNAIPKKKEGIMVYYSKKHVNIAKGVAAPEEPLYYTVAEAMEKFNLTRDQLYHYAKYHNIPKVKKGKYTLISKPELDKLLAAPKIEMTHTCTKVTVRQRAIRNNRISLYLDYYPAVRNPETMQMSRREYLGIYIYAHPKNEMEREFNNDMLNKAEAIRCIRVQSLINEEFGFLDKTKQKADFLAYFKKMCRSKDQKWTFVYQHFYNFVKGQCTFGEVNVDLCKKFREYLLSAKQLKHSNRPISLNSASGYYSTFRGLLKIAYRDKWLRENINDYLDKIEPQDVKKEYLTLDEVKQLAVTPCDIPVLKAASLFACLTGLRISDILNLQWEDFAIAPDQGYCLRIRTQKTQTEATLPISYEAYELCGTPDTGKVFKGLKRSMINYPLKNWLKKAGITKPITFHGFRHSYAVIQISLGTDIYTVSKMLTHKNVSTTQIYADLVNVKKRETANKISLKMNIAMKRGIITNNGHGIHISDGEVWMTAWEIADLFYTTVGSINSRLKAILKANVLKGYEVCQYIKLENGNSADVYNLNMIIALSYQIDTGHSAEFRKWLISKVASKQKGISLFIPISAANIHNCMLIVCVQIYIISKMYKYISLKVAAFVTKRMKQKKIEHITLNLIVFGTIAIIGVLARQTVLHYGWDEFSSYLILVVCSIIMGAIYLNLQMVFSQILSPTIEKCFMRFECYRNKFVVVETPIARAELVESSIISESCISEPKIEIETTSDTTEEVSISSCSKLNEEVAELPKEEATPSTINNISIEESNQPTEYEIFRANAMAEKERASQEKLDKVLSYTKQNLALYLSETDLNRLCGYITEYFLSDSLPKVEQIKVDTQLRTIDIMHFGWNIGKAFGKPRLQTATFIKKVFAHTLRDSEISTIERKMSHTESECKIKLDRKIAMIIYFKTSFMKYLKYFLLVILQFAIVELVVWFHTTGLGWHISELTPSDAISLWGTVTTIVFLVFSVLALWNVDQKIQELNEMKRSIGDKFDSIETKNREVMLEADKAQRDIVKQAEEQIKRILDKSTYRQNFYDTLTRIANEPDFGRQVQEYTHFLRTSGDIEGINYAYVYICRGNAYLMLSRDDKALSDFEMAAKLDTKTVVPFFALGHYYVTKKDYLKSIEIYKEGLKIDPQDDSLLMNIANSYSAMGEYAKADAYYDRALTFNPDLAMAYYNKAKLTKEKKEELWKEKCMAYLNHCIKIMPYFYDSNINKAALLREDNKNAEAAEVLTNVIEPTFRPEFIMAILQRGIAYRLIGKMPQALNDFNTVLLYQPHNVQNLSNLSVAHFSMGHINEALYFAHIGLDEAEQQNRHDCDAEFNEVINRIDAMSHTIVRTQMEVLSNLIIFLLISVYPLIIITVGGIKNTETQNTPSNMQKETVTFDKLPEAVGYLTEQVIELKKMVAELQPPASDKHVLVEIEDACRIIRKAKPTIYTLVRKGQLPAYKKGKKLYFYEDELLTWIENGRRKTSEQTYEEMLANMQDGVRHKPKSSVKLMDTYSINPVSIIDEAIDLSTRLSGTAFPVSIFPNKIQRIIREVHECHNYPTDYIAAAILTAIAVGIGNTHLAQIKQGWTESPILYMALIGRPGANKSHPLSFAMKPFLDYDYKQNQEFEKMLAKYDELMSMSRKERAESGSEQFPQEPIRKRFLVSDVTPEGLSLIHAQNKRGLCLWADELSAWFKNFNRYNNGSEEQFWLSVFSAKTTISDRKNAKSSIFIKRPCISVIGTIQKKILNELAKGERSSNGFIDRLLFVMPNLQQKARWNDKELLEDIEQEWNAIIDKLIQSECHLNEHGEIEPQILFFSEDAKKRLYEWQHHFSELCDRETNDTIVSIYCKLEIYIIRFCLIIQLARWTCGECDKTCIDLLTVERAIKLTEYFKESALNVQNILNENTLNSQQQTIVNLLPPSFTTAQAIQIAEQNGMKERTFQRFLNDNIGTLFRKEKHGEYSKINPMSTHRFILEPYKGVSTRHTCPNCHRQRCFSKYIDTEKQIKFPEYVGRCDHEQKCGYHFTPRDYFKQNPSEKEKFAENSFGSYTPIKEVKPIAISYMDLDIVNQSLRGYSANKLFQFLSAQFGETETLNLMKRYKVGTSKYWDGATVFWQTDNQSKVRTGKIMLYNSETGKRIKEPYNHVTWVHSVLHKGDYNLKQCFFGEHLLSEDKSCPVALVESEKTAIIASYYLPQFLWIASGGKNGCFNVNSLSVLAGRSVVLFPDLGATDYWQSKISLMKSCGIEVQMFDYLEANATEDERKEGYDIADYLLKVKPDEAILQQMIRKNPILKTLIDTFDLKLISVQQGTPRPKVLPPKKRGFRLMEKKYTVTLRLSYQQYAWLGALCRRSKQTQSEVIRSLIENGSVRERITQEHIHIIRQLIGESTNLNQLARQANTYGFFAVADRCKEMAQHINLLIKRLKDDRMIGKQTKGTSFGGCVSYVLKEEKSKLLEAVGVEGTPEQIAEQFELQSLLNDKVKNIVGHTSLNFSPEDSERLKHDDELMLQIAHDYMKLMGIENTQYIIARHIDREHPHCHIVFNRVDNDGKTISDKNDFRRNEKVCKMLTAKYRLHFANGKDHIKEERLRPYDRAKHEIYKALKEELSQVQNWADLKDALADRDIDMKFKVSRTTREIQGVKFEYNGFSFSGSKISREFSYLNIDNRLEENACASLFESPKQESRHKEENVQQSVSHSDDGSSISLGLLNGNSSYDATAAEEAEFNRLMKKKKAKRKRGFHLMEDLILDFNLYLCEKFGYRNSCSVMQNANGFCVNISERDLDCYIRFWEYSCGRGNFPDWSIIIVRSNFKKNQEESLKDLARFFKEYMPRYGYKYLCTEGDNYKYYQTLGLKLIYRGFFDQNNYGLPMKDLNVMTIDRNRIKLELLNFRNYAEIYADSRNLITEYERNDNKITAAERHDIRLTKLEKNAKAKIPFKELFDRYAELKASDTNPFSTDVFALSLIERRNPLVKQAFEILGTERVRELKYNQTQIRRELIKCSADELAYKIVKRINADLPHGKAIPSKIIKERLQTIYDDLGVERRAKATDIVQMQVRLWHENSPLASVVNLCHNAVTHNIPCNLHFFVNSVDFIGRVLHHARLSPDEVKIVCSTSGTSEQINREKLGGDYSIGIPDKAVRKINFYTSTAFEGCDIYDKQGKIYVVSDGTARHHLLDVSTTIRQIAGRIRDTRYKEITHIFSTVRYAEGITYPQFKAATEKELDKAERFVKMATYDAIPRVAEIAGAEIYAKALLLVDEYHRLLFDYSFRHRAITGLLAEMLKFSRATYMSATPIEREFLLDELQTLPTTRIVMNSIITAPSDALHVQQIPELDNELPANCIFNKGKTGCGATTLAIENRVPTLIAVPTVNLIKNKLPEHADLLGVYGGVTNQEIADYLKAHDRMGVKRYFMNEKEADAIRKSMYESLLMDENDKIVHWDFDPMRRELREYVDIACGCDEQTYGIRTPQFEYRYCTGKIKMPFAKSDYLANDDIIATVKGLGLDVEKFWFALVFIYDYVETSFKNCGLVKPASLDKAVQNLFKELGEDFADDDIEITLKKNRKKVEVLPVIKRGILGWLRETYERECKGRKIQYYGIDTGNFDETYPSTSFRIYRTVEMYRDMLNTLLGDNRPKQPDKSVSLNRLLLISRICYLYEFTRNDSFLYSDDSLKGIIKSCKGRMPATYSAVYLMNTIIGKNNVNEQTTANAATATPAPVAEQKEQQTAQTSRRRRSTTPPMWRVMTQARPVFDVQLKKDNEIKLACINKFMNAAYSDANKFWADFMEQVNILLDSRRYCRECKILGLKPEYVAEHIVFLGSATMKKVLKDGVSRTLGADVQLYGKRFSPEDADKFLSEDIKRLPEQTTVAMKIKAICRHEIVYKNGKSPLAIRFTHQRTHKTVSLGISVEPHYWDKTAEMITANCPERAALQSQIDSTLAGYRKKIQRLEALDIPVTFDTLFETDKSRHAGITIEDGFNAEIERLESLGKINSATKHKYALQVLNGYKSVKTALEAIDLDYLKGLELHLRQRGNKDNSIATRFAIFKAIYNKAVKEGKVAVKQNPFSIYQVGSLWAKTRKRAIDKDDIQRLIDLEITEGHTTEYRRLAKDLFLFSYFTAGMNFGDIARLRYKDIVKGRVNYSRHKTQKLLSFQLVPMALQILEKYGMAGHGEDYIFPILNRHEHTTPQQIFNRLHKVLRKVNRELKTLGEQIGLEMPLTTYVARHTFATVLKRSGVNIAIISESLGHSDLSTTQIYLDSFENSQIDAAMQNLLMEKVRFFLSFLLSSPRKFRIAMVSEVVRTGIRILGKIKNYEELIRMQDKATLNPTPDQTFEIVGQGAYDFVRVLTHSKQLQRQGRVEEACNERFHAFQRISELLPEDEEVILEWEDPNTRAALEVIHASAIDHFLINDFEMSTAMLELLLELDPEDHLEAIILLAFNYLAMEEYELFDEVSNDISDKYACKEVLTMWAAFRRSGRIPEGDAIRFRTRFAPYFAEFTADEHPADGQYLEDIESERPSVQAQARELWLRTENLWTLFPDFIAALRRMKSGVSFLQIHILITPIFIGFRSGENFDSISCKKIRKARTHRTKEMKRSDIEIMAPAGSYESLHAAIDAGANSVYFGVGRLNMRAQSAANFTLEDMGQIVSIAREHGVKSYLTVNTVIYDEEIETLHATIDRACEVGVDAIIATDMAAIQYARSVGMAVHISTQSNISNIEAVRFFAQWADVVVLARELDLVQVAYISREIERQRITGPGGELVRIEMFAHGALCMAISGKCYLSLHTSDGFSANRGACRQICRRKYLVTDPETGETLDVEGNYILSPKDLCTIDFLDYFIESGVRVLKIEGRARGAEYVKRVVECYDRALRAMEDGDYTPELAAALKERLATVFNRGFWEGYYAGRPIVEHSRHHGSAATKRKVYVGKVTNFFKKISVAEVLVEAAPLYEGDELLWVGETTGVVEQHGDEIFLDEHPVQTVLQGTTCSVKTVQLIRRGDKLYKLVDTIGMHAIDFFSYFWGNVFDKSRQNEFPELCRAKKTTTKFNDSYPASFSMQNNDQILEAIEHYLGQIGYPEEPGRLYAPISYSLTMSGKRLRPMLLMLTCGIFSDQPQAAMPAAAAVEVFHNFTLLHDDIMDNAAMRRGNPSVFAKWGQNVAILSGDAMLISAYRLLSEYPPQVLPQILARFNTMAIEVCEGQQYDMDFETRESVSVEEYLHMIELKTSALLSGATVIGAIIGGAGEEDCQRLYRFATELGLAFQLQDDLLDSYGDERLGKAIGGDILEGKKTYLMVMALSKASAAEHRILASTYSDPTLSDQQKIARVREVFDKLGVARLTEQQINHRFERALNILDTLSVQSEGTARLREYAGSLIGRNKMKKLVIGIDIGGINTVLGLVDRTGEVYARSSFRTAEYPFFDDYPAYVEMLVRTLRELCAAMPAGAVLSGIGIGAPNANYHTGRIERPVNLWKFRSGEPNPEEGRRFFSLCKEVGNSFPGIPVRITNDANAAALGEIAYGNAGGMRDFIMVTLGTGLGSGFVAGGRMIYGHDGMAGELGHVVVEPGGRQCGCGRRGCLETYVSATGAKRTAFELMARETVPSVLRDVPYDKFDARIITEAAQKGDSLALEVFRCTAERLGRALANAVAITSPEAVFFFGGLAQAGELLLEPTRRYLEENLLPVYRGNVKVLPSGIPAQNAAILGASALIWNEMEENYQGYNQPEYENDDPRKGANKSILGYRIVIIILAVILAAITVLYYNIHRQQQADYDLLVIDRDSIQNNLSDLMQDFDDLQLSNDTLSLQMGIERQRADSLMQRLKQERSWSLAKIKQYEKEVGTLRTIMRGYLHQIDSLNTLNKKLIDENVSYRKEITTAQMRAEMAEEKAQELNNKVRQGSVINARGIRMVALNARSKEVSRIKNAERLRVDFTLTANALATPGEKTIYVRILSPDGYVLSSESVPTFEFEGERLSYSASRDVDYQNEDLNIGIFYTGSGFTAGTYQVQIYCDGFLIGSIELPMRMKKQIFFTVLFFLAALPAGAQLYQPGEVLDYRASYKAKFFPNTEVGSVRVTTVEEEYEGEPMYRIVAHGKTLPAFRWVMNVDDKYTILVDREELKTRRFESDIREGNYRFWSNYVYDWPEMTVHTRWQGRRMVRDTTKTMSLTPRSMDPVSLYFHLRSIDPATLQEGKTEVLEMLLEDTIRHLRYRFLGRETKKIRSMGTFRTLKFACQIGTSEGYSFTDGTEFTVWISDDKNLIPLYIESPVRIGSVQAYISGYHGLKYPLSSKIKMLFFTAVLSVSAGAFADELRKVFDSDFAIRRLGSSFRCGMANYLDNDIKFVAGVGEARARLLEKELGIRTLGDMLCHYPFRYIDRTRIYRIDQIAEGDSALIQFRGRITGVSYAGAGRKRRFTAVVNDGSGVAELVWFQGIKWIEKRIEVGREYLIFGRPSFFKGELSVVHPEIETIEKAFSRKAESGLQGIYSSTERLSSVLGTKGIYTIVCNLWPMVRDHIRETLPDRMRTRYGLLSLRDALYNIHFPQSPELLRQAQYRLKFEELLGIQLGIQSRRTARLSKNNGFLFPKVGGVFNTFFNTRLPFPLTGAQKRVVKEIRQDTISGYQMNRLLQGDVGSGKTLVALMSMLLAVDNGFQACMMAPTEILARQHYATFQRMLEGMDVRVAILTGASKARERREALAGIADGSIDLLIGTHALIEDRVQFSNLGFVVIDEQHRFGVEQRARLWTKNEQPPHILVMTATPIPRTLAMTLYGDLDVSVIDELPPGRQPIRTVHYTDAARLRLFGFMRQEIKKGRQIYVVYPLIKESETMDYKDLQDGYEAISRDFPLPEYVTTICHGKMKPEDKEESMRQFKSGEANIMVATSVIEVGVDVPNATVMVIESAERFGLSQLHQLRGRVGRGSEQSYCILMSGEKLSKEARLRLEAMCETNDGFRLAELDLKLRGAGDVNGTLQSGMAFDLKIANPTLDSQILTVTREAAAEVLTADPTLTQNGHEGLRELRKRYSGREEIDFSQISMEDYILREIDKIGKLIEALLQKAGILRRSGAGEAVCETARTELAEALDLDIDTLLAREDFIGVLTREYGFSDENLEKFAELLFDFAAASPDRDATVRLACGITAIYRYLDEKKAPVSLNRYYILKELENMTARMNLTKYERRPSREVRIGRVVIGGDRPIAVQSMTNTDTKDTEACIRQIERIFRAGGPIVRLTAQGRREGENLERIVRRLREEGCDAAVVADIHFVPEVAAIAAKYVDKVRINPGNYNSSHGEFEALIDRCRERGVAIRIGVNHGSLSKRVFDEWGDTPEGMVASAMEFLRVCREKAFDQVVVSMKSSNTRVMVAAYRLLAEAMEREGMDYPLHLGVTEAGNGIEGRIKSAVGIGALLADGIGDTIRVSLTEAPENEIPVAQLLVDHFARRSGVFSVKYPERYTPTRYSRRTRVQTPLIHSELPADWRMIEALTENPTAELRAAILSLDRADEPVAVCRRYDDPTVEAVAVKAAADLGALFLDGLADGIRIDAPHLSEKEIAEIELMILQAARVRMSRTEYIACPSCGRTLYDIEGTLAAIRARTSHLKNLKIGVMGCIVNGPGEMADADYGYVGAAPGRITLYKGRTVVEKNIPQEEALDRLVALIKANGDWADPENQPERPMKKLLLIFLLIAAWSVQAREVYPLCDDWLFSFRYENSSDNARCVTLPHTWNLDALAGTIPYLRTTADYQRKLYVPQTWTGKRLFLKFYGVESVAHLFVNGTYVGEHRGGTTAFVFEITDRVKYGSENLLRVAVSNAITGDVLPLSSIHNIYGGISREVELIVTDPTAVSPLYLGSSGVLIHPRAVSTERAEAEAEIHLTSKGDNFCRVTLEAFDPDGIQAAAKTIKAKLDGKPIVIPFTVENPRLWDLDHPNLYRMRVSVESDTSRDEIEIATGFRNIRVTPEEGFRLNDSLVRVHGVTLYYDRPGTGSAMEAEDYAEDFAFIRELGANALRSPAGPHAPCLYDLCDRTGVLVWIDLPLIRAPFLSDVSYYPNPQLEANGRQQLREIIAQHINRPSVVIWGLFDCLWQRGENPVPYVRTLNELAKKMDRSRPTAATSNQDGELNQITDLIVWAQNIGWDKGRTEDLEIWLGQLRSGWNQLRSGICYGEAGQIEQQGDPARRRRSNSLLWQPEGRQTRFHEDYTKYLAQDTLLWGTWINTLFDYGSARRPQGVEATGLVTLDRRRRKDAFHLYKALWNNTEPTLHITGRREDERNGDLQTVTVYSSAGEPVVTLSGDTLAVEQYAPCIYRCDSVRLNGRMKIEAKAGDLYDETFLTGNCALVAPPRRDPQQTAGLRLTNMAPKGIFRKTVLFRIAPKEPGGSGGLSETVAQRYETRPIFMSEKSKGTLCGIVAAVSYGMNPLGALSLYRAGINTNSVLFYRYALAAVLLAALLLVQKTSLRITRREFSVLGLLGVMFAVSSLTLFMSFHYMDAGIASTLLFVYPVMVAVIMAIFFRERISLVTVLSISLALCGIALLYRGEGGAVLNTAGVVLVMASSLSYALYIVVVNRASLNMSSVKLTFYVLLFGVAAIVLYSLCCPDQPLQLLSTPSMWGGGRRCWLMLALIPTVVSLVLMTVAVHAIGSTPTAVMGALEPLTAVVIGVTIFGELFTARLAAGIGLILLAVTLIVAGKSLHPGRLAAIIGHRGFLRHSRMKPNLKELNLEKLKKIAAKTPRIRVKLTRKHWIFIGCAVVVLVVLLVVLLRPRPQAAALPVVAVEPVQVEDVSIYGEYVGRIRAQQFVEIRARVEGYLEKMLFAEGTYIKKGQTLFIIDPTVYRARANKAKAQLNKARAQALKAERDLNRIRPLYEQNAASQLDLDNAIASYESAVADVVVSEADLTQAEMILGYTTVQSPISGYISERNADIGTLVGPGGKSLLATVVKSDTVRVDFSMTALDYLRSKARNVNLGHKDSTRKWDPYITVTLADGAQYPYRGLVDFADPQVDPQTGTFSVRAEMPNPDHILLPGQFTKVKLLLDVLERAVVVPKKALIIEKGGAYVFVVRRDSIVEKRFVETGPETGNNFIVERGLASYENIVVEGYHKLTHGMKVEPVAPREEEANPEEEMKADFFIDRPVFSTVLSIIIVIVGAIGLALLPVDQYPQIVPPVVRVSASYPGADAQTVTQAVATPIEQELNGTPGMIYMESSSSNSGGFSATVTFDISVDPDLAAVDVQNRLKKAEARLPAEVVQNGISVEKQAASKLMTITLLSSDPKFDEIYLSNYATLNVLDLLRRIPGVGSISNVGSRYYAMQIWVQPDKLADLGLTVKDLQSALKDQNRESAAGVLGQAPMTGLDVTIPITAQGRLSSVSQFEDIVIRANPDGSIIRLKDVARISLEASSYNTESGINGGNAAVLEIKMLPGANAMEVAEAVKAQMEEISRNFPEGISYEIPFDMTTYISESIHHVYQTLFEALLLVILVVFLSLQSWRATLIPIVAVPISLIGTFGVMLVFGFSLNMLTLLGLILAIGIVVDDAIVVVENVDRIMNEEGLSPYEATKKAMRSLSGALIAMSLVLCAVFVPVSFLSGITGQLYRQFTITIAVSVIISTVVALTLSPVMCAYLLKPDRGGRKKRFFRYINFGLAKGNKLYGRMIGRALAHSRRMFAAFGVVLIGIWLMNKLVPESFMPQEDQGYFTVELELPEGATIERTRTVTDRAMAFLMQDPDVEYVLNVTGSSPRVGSNQARSQLTVILKSWKERESEDISEVMKRVRDELSRYPESKVYLSTPAVIPGLGTSGGFEMVLEARGDAGYADLQRAVDTLMHYAEQRPEFTGLASSMQADIPQLYFDVDRDKAQLVGVSMSDIFSTMKAFTGSIYVNDFNMFNRIYRVYIQADAPYRAYRDNLNLFFVRGADGAMIPVTSLGTTHYTTGAGTIKRFNMFNAATITGEAAHGYSSGQAMDELENIVREKLPASVGVEWSGLSYQEKHVSGQTGLVLALAFLFVFLFLAAQYESWSVPVAVILSLPVAGIGAYLGIWVCGLENNIYFQIGLVMLVGLVAKNAILIVEFAKEEVEKGRDVVSAALKAAHLRFRPIVMTSLAFILGLLPLVFASGPGSASRQGIGTGVFFGMLVAISVGIVFVPFFFVWIYRIKAKLKKRMKRVAIFVILAALTVGFSSCSAVRHCQAPEVEMPGQIASGYTDSLTIADLSWWQFYGDSTLRRVIELTLENNKDMLAAAARVEQMRQLYRISKAERLPNFSAKGLADYETNDYADEESSRDPEFSAKLSVSWELDLWGNLRWAKRKGGAEYLSSVEDWRAMRMTLVAEVATAYFQLMALDNELSIVRRTLRTRSEGVQQAQLRFEGGLTSETVYQQAKVEYASTATLIPDLESRIEIMENSIALLMGKSPDWEVLRGQMNIEAEFPDSLPVGLPSGLLQRRPDVRASEQQLRSAMASAGMAYADRFPRLTFNLVGGWENDALQGFFRSPFSYVAAAIAAPVFGFGRKQAKYRAALAAYDVARLGYEKKVLEVFKEANDAVVTYRNVRKTAALKVALRDAARKYVELANLQYRGGSINYIDVLDAQRRYFDAQIGLSNAVRDEHLALVQLYKALGGGWGVVAEMESPLFLFDKAMERFLAIKEKLLLVTDRQDIIGSGEIFMTNTQQKIINHELVTAMGEVLYYEILSIYFARQPQQPQHKDRKDHVFQNFIISLYQNHRMEREVTYYAQEQYLTPRYFSAIIKEKSGISALQWIIRMVIADAKQMLRSSDLSIKEIASELNFSTQSFFGKYFKQYVGISPTEYRNGKLVGQSQQSVLERMRICHRGVYCRNPLPQCVDQLVNVYVLFFRQRQAGVFVDEKIPGRMECLFRIGQDVIYIDCEYDALQILAPMFYLNGHKKRRDVYVSLADVICLVFLNDVEFPALAEEKAAFIRSGEGITFFLHGGCERWNSRKFYWSRHRIRFFVIWSQNRKKGYKAQIIYNIPFDNRTNRIMNKQNMLREEVFQKATDGRPYSCFAEHYGQEYSECDAGKERAKQIAGRFFPGRRGVCFTQEGRIAGEGGKVSQTGMACEAVRLPLPPESLVCQQPCTPFRSVAYTGDDERIVLFFGSDRGPSAAGGVGRTRGKTFEVFKRDRQPGPVRRQGFGRDQQGPMAKLERLVIHCTATPPGREVSAADIRRWHTAPVSQGGRGWRQVGYTDLIHLDGSVERLVPNNEDRTVDPWEITNGACGYNATSRHIAYAGGVAADGTTPCDTRTPQQKSALEHYVRDFVARFPGAAVVGHNELAAKACPSFDVQAWLRETGILMKGVGIGAMTGFGREWIRFRPRRREKVARFGLGRRSAGLRGGVTVSAFFGKAGRGRWVFAKITGDAPEYKSEGHPAAFRRHDVGLFRCDAADFRFFGLSLKRFDGSGYEISEMHVCCSIMIVFLAVAALLVAAIALFMNRPEFGRAPRGERLERIWRSPNYRDGAFRNRHATPQLTSGKGWWATMYDFLFERKERNRPDHALPAVKTDLKALDPKENLLVWFGHSSYLIQADGLRILVDPVFETASPLPFFNRPFEGTDLYKPEDMPGIDLLVITHDHWDHLDYGTVTKLRDRTGRVVCPLGVGEYFEYWGFDPQRITELDWGEQAALGGGFTVYCRPARHFSGRTFRANRTLWASFVVETPSQRIFLGGDGGYDTHFADVAREFPNLDVAVLEDGQYSEDWRYIHMLPADLKRAVEDLGARRVFPVHNSKYALARHPWDEPLNNAAALAAENPEAGIVLPRIGEPVRLDRSDTLPGRWWTAPENMKKIVLLRHGESAWNRENRFTGWTDVDLTDKGVEEALKAGELLKAEGFRFGKAYTSYLKRAVRTLNCVLDRLDQEWIPVEKNWRLNEKHYGVLQGLNKSETAARFGEEQVHIWRRSYDVAPDPLAEDDPRNPRFDPRYAGIPDEELPRTESLKQTIERALPYWQCVIFPELSVHDEILVVAHGNSLRGIIKHLKGISDAAISELNLPTAVPYVFEFDDKLRLVKDYFLGDPEQIRKLMEAVANQGKKMKTIFFGTQPYDRESFDRINADYGIRIKYHRSHLNIDNVPLAQGADAVCIFVNDSADAPTVGELARMGVRLIALRCAGFNNVDLKAAAEHGITVVRVPAYSPYAVAEHAVALMLSLNRKVHRAYWRTRDGNFALHGLLGFDMHGKTAGIVGTGKIARALIRILRGFGMEVLGYDPCPDEAFARESGMTYVPLTELYRRSDIISLHCPLTDRTLHMIDAEAIGQMKDGVIIINTGRGQLIRTSDLIEGLKEKKIGAAGLDVYEEEADYFYQDTSDRIMDDDMLARLLSFNNVILTSHQGFFTREALDNIARTTLENIQAFSHGECLNEVKYKMRQSASKSEPNEGHIAFDTVCAANLPLLAQSVNGTDNTASTKTLMRNPRERIRNSRGYKWWILSLVMLGTFMAVMDVTVVNVGLPTIMSVFHIPISTAEWVITAYMITMTLMLPSAGWIADRIGNKRMYILGLALFTFGSWLCGRAGSDMFLISARALQGFGSGIIQSLGLAIVTREFPPQQRGLALGLWSVAAAASISFGPLIGGYLVDDYSWHLIFDVNVPVGLAAILFAIFIQKEWRGSRAGSFDWLGFLCVVCFMPLLIFALARGNSPSNPEGWSSPEVIGCFAVAAAALIVFIVRELRCENPLLNLKLLGERNFGVSMAVLAIFGIGMLGGTYLLPLYMQKGLGYTAIMAGSVFLPVGLIQDVLSTCSGFLTRYIKPLFIAVTGILVMTLSFYFASRFTLHTTHAQIMLVLYLRGFGMGLTFAPLNDFSLMNLSQRDMASAAGISNSIKQLSGSVSIALLTVILTGRTAFHSAQGGLSSAESYVAGISDDFLFVTFVSLASALPFLWLLRPRRKAASFKSEGTGTMKNDQQTYVPDPEVASRLLEWYGREGRDLPWRRTRDPYRIWISEVILQQTRVAQGMSYYHRFLELFPDVVALASAPEDLVLKCWQGLGYYSRARNLLAAARRIVEMHGGVFPTDYADVRALPGVGDYTAAAICSIAYDEPCAALDGNVFRVLSRLYDLDTPIDTTSGRRTFAALADSLIDRQRPGLYNQAIMDFGALCCLPVQPRCTECPLRDRCLAFAARTVDVRPVKQGRTAVEPRYFNYLHVECGDELVLRRRGAGDIWQGLYEFPLIETPEPVEYTVLAAMPEFCALFKDTGTVCLVGTVTMPVHQLSHRAIHAVFYRIVVERWTPSLREMLVIPREILGDYAVSRLTERYLSRMFTGVQFTHFIQANPALAVFLTVALGFLLGKLRIRSFSLGTVTSVLLVGVVVGQLRIEIPEPAKTLFFLMFLFAVGYAVGPQFFRGLKKDGLPQVAFAVVVCLLCLGSVWLFSWLMGYTLSQAAGLLAGSQTMSAVLGVATDTIRELPGGAETDLSSMPVCYAVTYIFGTAGSAWVLSSIGPRLLGGVAKVKQSARDLEQKMGEDVSLKAGFDPAAREIVFRVFSADNEWFEGGRTVHEFETVMQRDGKRIFVERLCQQGKVVDEVTPRTVIRPGDQLVVSGRREYVISEEKWIGAEVSDTTLTNFAVQVLPVVVNRKGAAGERIGKVLSAKFMHGVNIRSIVRAGVKIPVRSGAKLDAGDRIELVGLPQDVRRAAAQLGFSDPVKTESSVPLLGLGICLGGLIFGWMLVAKIGAIPLSLTVSGGVLLAGLFCGWARSRRPTLGGIPEQTVWFMNNMGLNTFIAIVGISTGPSFVAGFQQVGWSLFLVGAGATTLPLVLGVLIGRYLFRFNDALTLGCVAGARTTTAALGAVEDTIGSNVPSLGYTITYAIGNTLLIIWGVVLVLLLAMSAKLAKYDRLYEQIKGYVQTTDDIWARLATMEAVLHHKMQTFFWTGVYALIDDELIVRSYQGPVACQKLRHHTGVCWAAVSTGETVIVPDVERFPGHIACNSKSRSEIVLPIRDREGRVFACLDVDSDRLDAFDREDEEGLKKILSLLFDMCKDQKEANNRTDSYVKIAEPPPVRYKNNRADAAPNLLGHPRQRNLFYTTIAERRTGFRGMKKLFITMALVLCAAAASAQVVAVAEEIVVEEQQPKRRGWAGYETNRFFDNWEITVAGGAQIMVFNGTLGKDDFGSSRFNHINWQADFSLTKWFHPVMGARLQIQGGQYQNDTAFGNQYMKDPYIFTHMDFMVNLSNWIGGERDDRVYYAVPFAGFGYHVSGFTDKFQRDWGYGTDHSFAFTAGLLNKFRVCPALDIELELKAWMLPSSNMPSILNSGTQKVAAAYSATIGLTYRFNRRGFKQASPYTVEDVMAYQAVIADRDLALAAVQADNAELANDLAAANKAAKKAAAEAAAAKKAAEMAKWGPNPIPADQLDGNAYTDDIYLTGKGITFFNIGQTELSPKEKLRLDIIATQIKNAPKNKIYVIEGHADPQTGSKAVNTRLAEQRAKKVYDYLISKGVKAENLQYKGYSDTKSPFKTEQENRVTVIRMILCRQTIKYTKRQTRSGLLARTLLLASTKGYIEMNQAPVMSSNKQPGLPTEVSYNEAVEASKKYFDGDDLAATVWVSKYALKDSYGHIYEKTPRDMHERIAAEIERIEKKYPNPMNRQEVFELLDHFRYIIPQGGPMTGIGNNFQAASLSNCFVIGHKNPADSYGGIFRMDEEQVQLMKRRGGVGHDLSHIRPTGSPVLNSALTSTGIVPFMERYSNSTREVAQDGRRGALMLTLSIKHPDAERFIDAKVDTSKVTGANVSVKIDDEFMRAALAGKKYHQQFPIHSDKPLYQQDIDAKKLWDKIIHNAWKSAEPGVMFWDTIIRESIPDCYADEGFTTVATNPCGEIPLCPYDSCRLLAINLLSYVDKPFTKEASFNFEKFKQHVEKAMRMMDDIIDLELEKIELIINKIAADPEDEDIRRVELELWKKIRTMARKGRRTGLGITAEGDMLAALGLRYGTPEATAFAVKVQKTLALEAYRASVKMAAERGAFEIFDARKEEKNPMIGRIREADPELYAEMVKHGRRNIAMLTIAPTGTTSLMSQTTSGIEPVFRPVYKRRRKINPSDQDAKVAFVDDMGEKFEEYNVYHHNFVKWLEANGYDTSKLQDISDDELNRWVAASPYHGATANDIDWVAKVKMQGEIQKWVDHSISVTVNLPNDVSEALVADVYRTAWECGCKGVTVYRDGCREGVLIDKKKKAAKEENGQTILKRPKSIPADIVRFKNGNENWIAFVGLQDGRPYEIFTGKIEEDAMYIPPKINKGFIIKVREENGSKRYDFQYIDRYGYTNTIGGISRLFNEEFWNYAKLISGVLRHGMPITNVVSLIESLHLNSETINTWKLGVERALKQYISDGTKTKDKCPSCGQETMAYQNGCLTCMSCGYSKCGMKTIIASPKAPKAVGPYSQAVKCGDTLYISGQLPIDGATGAMPESIEDQTRQSLTNLGHILEEAGYSHADIVKTTVLLTDIADFAAMNAVYATFFTKDMPARICYQVSKLPMGAKVEIDAVAVKMRNGAKNGVADIPCDRKSTHPISDQTRTGYNEKENSTINFNESKMTRFMKLAALAALVMLVASCCPCRKHRKGDGKPFVGTEWQLVQLNGRAVPVEGDLFTVVFGEDGRLSGLGACNRFMGSYQTTETGGLTVGQNMASTRMFCPDLDREQAFGDVLSGATHYEVDGDMLMLLTDGELRAVLQARMRSGVVEVDSARRSLFTRCHMAGLYFHIPFCRRICAYCDFFKSAEVGRVDSVLEAMERELDGAVDWLSDRRIRTVYFGGGTPSLCDPARLQGLADRAAALLDCSGVEEFTVEANPDDMTGEWLEALARTGANRLSVGVQSFDDDELRLMNRRHTGMQAVEAVRRAQAAGFANLTIDLIFGVPGFGGEVLRRNLDRALALGVQHISAYHLTIEKNTAFGRRLERGRFSEVDEQVSEREYLEVHRTLTGAGFEHYEVSNYALPGCRARHNAAYWSGDEYLGIGPAAHSFNGKSRRWAAASIDGYLPGAGTEAIYEQERLTERDRYNEYLMTRLRTAEGLELAAVETRFGKERAERLLRQAEPFMGIGELCFAAGRLAIPAEKFLVSDAVIGALFEADDMNDMKLKPDFLFEISWEVCNKVGGINTVIATKARTVCVKYGDRYFTIGPDLGQGADREFEEDPALLKGWRQTLYEKGIRVRVGHWRIVGRPQVILVDFSSLIPRKDDILKFLWESYRVDSISGQWDYIEPVLFGYAAGLVVASYVETFCKSANRVAAHFHEWMTAAGGLYLRRESPYVATLFTTHATVLGRSIAGNGMPLYRDLTTYNADDLARRFGVTAKHSIEKKAAANSDAFLTVSGITATECRYLLGHEVDVVTPNGFEDDFVWQDDDYRIKREEARAALIAVAEACLGRKLQDNPLIVGTSGRYEFRNKGLDVLLEGMKRLAGLERLDREVVLYVMVPAANRGARADLQKHLQDPSQPIDGSQWPWATHYLENMQWDPIVRAIDGSPLADPASKVHVIFVPSYLDDRDGIFDKSYYELLVGMDLTLFPSYYEPWGYTPLESIAFSVPTVTTTLAGFGLWIDRREEHPGVAVLCREDGNDDEVASALADAVLRFSQLDAARVEEMRRAAGVLSKEALWSRLFEAYEEAYALALDNADVRMNHVASNATPLPEQQVKLVHQALRPERPEWNRMMVEKNLPERLRPLEELAHNLWWCWNPGARDLFEEIDPDLWNRSERNPIAFLDLLTINRLKELERDESFLASLDAVYAQFKSYMSEKPDPATPKIAYFSMEYGLHASLKIYSGGLGILAGDYLKEASDKNVPMVAVGLLYRYGYFTQKLSAQGAQQATYEAQNFSKLPIQPVRDAVGNWATVSIPLPGRTLTARIWLCRVGRTDLYLLDADYEANLEEDRRVTHYLYGGDWENRLKQEILLGIGGVRALQSLHIAQDVSHCNEGHAAFLGLERIRNLVMRRRLTFAEALEVVRSSSLFTTHTPVPAGHDAFPEAMIRQYLSHYPEELGIDWAQFVGLGRVNPEDPNEKFSMSVLACNLSQEVNGVSWLHGEVSKEILGNLWPGYFKNELHIGYVTNGVHFPTWTATRLRRLYARYFPEGFEGHEYRISEWKKVYDIPDEDLWQERMVLKEKLVRLIRRRYCDPGQVRMDSPHQVMQVLESIKPDVLKIGFARRFATYKRALLLFTDLDRLAAIVNNKERPVQFIFAGKAHPNDQPGQDLIKRIIEVAAMPQFSGKIIFLQNYDMELARRLVQSVDVWLNTPTRPLEASGTSGEKCVMNGVLQFSVLDGWWVEGYKEGAGWALPMETVFSDPQYQNELDAEMIYNTIEEEIVPKYYDRDADGIPRAWMASVKKCIAEIASNFTTNRMLRDYEVRFYNRLAARKRELSENDFAVAREIVAWKHKVLAAWPAVKIVDVQRARVGDKPIFIGRSYHFELTLDLAGLAPEDVGAELVVARPVEPDRVVEVIRTVPLSQVQVSGSQVTFALDYVPEQAGMFDMALRIFPQNPMLPHRMDFALVKWAMVCEKKSIFQKRSFKRTGTFSDPVGGENEINDSTGPAGVRADFAVPLCRKMSVLTFDKKELGNLEYSLQREMLATDRRGGYMSTTIVCCNTRKYHGLMVAPIDDSDRAYVLLSSVDETVVHDGQSFNLALHRFPGTYEPRGHKYITDFEYTPTPTITYRVGSIVLRKELLWIHNRTQLMIRYTLLEAPSDVRLRLRPFFAFRDKHALTHANMEADGRSRPIPGGVKCRLYSDFPWLYLQTDCRDAEFVPAPDWYYNFEYAREIERGYEGDEDLLTTGYFELSLGRRQSVIFSASVEAIPDPAAIGGMFAEALSARSRKVDFLSCLRHSARQFVVRRRDGRAEVLAGYPWYGQIGRQTLVALPGIALEQGRTEDCLDVLDTVVRGRRDGMFTGSFSAAEAADAPLWFFWVLQQLQRTLGEEEIWKRYGIVMKELLAAYRRGVGGVAVHDNGLVWASAPDKALTWMNALAGGVPVVSRDGYPVEINALWYNAVCYALELASRFGEEEFVGEWKAWPERIRNAFREMFWSGDDGYLADFVGPEGPNRWIRPNMVVACGLDYKMLDEEQQASVLRIVGQHLLTPKGLRSLSPRNPRYKNRCEGDEAVRAEASMNGSVWVWPLWFYVKASFDLGGREFLPRAEELLARFGEEIQSYGIGSINELFDGDPPHAPWGAVSQAWSVGAVLMIRETTERWRRRRGHGLLPGLRKKRMRVLMFGWEFPPHIAGGLGTACYGMTRGLARNGVEVVFVMPRAYGDEDQRFVRVVNASDVETIGTRDHEFSEELLEKVSFIHIDSNMLPYISPEEYAAYHDEFVRSGRTHEWTDVWKQRYTFSGKYGANLMEEVARYAMVAAQVAKDLEGQFDVIHAHDWLTYFAGIAAKRVSGKPLVVHMHATEFDRSGENINRRVYAIEKAGMQAADRVIAVSELTRRIVIGKYGILADKVVTVHNAVRFGESEEAAPERAVKDKVVTFLGRITYQKGPDYFVEAAAKVLQRVSDVRFVMAGSGDLMNHVVRRVAQLGIADRFHFTGFLKGGEVQRMFRLSDVYVMPSVSEPFGISPLEAMRSGVPVIISRQSGVAEVLDYAIKVNYWDVDALADAIYGLLTYPALGRMFASKGLEEVTGLKWTNAAAKIKTVYETVVAEANNMKTICFYFQVHQPWRLKRYRFFDMGRDHNYLDDLTNRSIMQKVARECYLPMNALLFNLIRQSEGRFRCTFSLTGLAVEQMRAYAPEVLDSFRRLARTGCVEFLAETYSHSLASLSSKEDFMQQVALHTELMKKEFGVAPTAFRNTELIYSDRIGSDVAEMGFKTMLAEGARHVLGWKSPGYVYANALDQRLRLLLRNYKLSDDIAFRFSNRGWDQWPLTAEKYTGWLASDELEGDVVNLFMDYETFGEHQRADTGIFDFMKALVPAVLKREGLEFATVSEAAAKYQPVAVLHCPHVMSWADEERDITAWLGNELQNEAFGKLYALRDKIARLKDPDFDHVWNFMQASDHFYYMATKWLSDGDVHAYFNPYESSYDAFINYMNVLSDFEIEVEKAFDRKPPVRKTKPSPRKKGSDREKAGVRMVADEITLQKVSISRIKQEMRDVYYLSDDLVIASFDIHRDTLGNYPALIDGFSAIIMASGSAVVAIDTEEYEVVPDTIVFFSPDRVIRTVASTSDAAAYFVACSKSFINEIQIDLSASLPVYMRFGKQPCLRVTPQDTHEIRQVFQLIKTILASDKEHYRQEIIRCLFTAVFYIITELNMREQKNTVKLGRGEVIFEEFMELVRQYSKQERNVRFYARRLNITPKYLSTVSKDVSGKTAARWIDEAVILEAKSLLRYSGMSIQEIAYHLNFSTQSFFGKYFKQHTGYSPSRFKRKGSMKQVLFLYNPQSGKGKIEKDSQAIGEMFRQAGYSIVDGPIDFSRNPFNGHETVDLVVVAGGDGTVNYVVNRMKEKHLDLLLGIIPAGTANDFAGALGMEKNPVKAAAQLLGGTEERVDCGRVNDHYFVNIFSFGIFTTTSQRTPDKRKHQIGKLAYLIEGVKEFRSVHGIPLQILADGKAFDLESLMALIFNGETAGGFHLAPRSSIKDGMFDCLLLQRRNMLFSVVSMLRHLLGGRPSQVKHFRARTLDITSPINEPTDVDGQKGADFPLHIECLHNELRVVCPLSEAPRRGRFAYFKNLISKLAWWRTRMKKIALLLYTVIVLVLAANCDRRAEYLTASGAMLGTTFQATGDITDCTAQELYRAIMQIDAEAKASMSIFDSTSLLSRINRGETDSLDEHIIYNLRLAERFSRLSEGHYDVTVKPLVDAWGFAGHEAERTPNLDSLLQFVGYRRVHIRDGRLVKDDPRVQLDFNSIAKGYTVDLVAALMERCGAKNYLVEIGGECRCQGVSSKGIPWRIGIETPFDGNMSDGAYLTGRIRMSEGGLATSGNYRRFYRDAAGNKISHTIDPTTGRSVTSRLLSATVVADNCAEADAMATMYLSLGANKAIALSRKIPDAKVYFILDDGKDGYEIYCSPAMQEMMIPEMGYLSAEKKQELFGKYGKSNTDTGSPESQIALFSFRINHLTEHLRSNKHDFGTQRALLRLVGKRRQLLEYLKEVDIERYRAIIKTLNLRKMEEKKLYNAVRKTITLADGREIMIETGKLAKQADGSVVVKMGDTMLLGTVVAAKDAKPDTDFMPLQVEYKEKYAACGRYPGGFMKREGKANDSEILVARLIDRALRPLFPSDYHAEVYVTVNLISADKDIQPDALAGLAASAALAVSDIPFGGPISEVRVARIGGQYVINPAFSQMQDADLDIMVGGTIDNILMVEGEMKEVSEEVMLGAIKFAHEEIKKHCAVQIELSKELGKDVKRTYCHEVNDEELRQTIIRELYDKAYAIATSGTMKHEREDAFNALEAEFAARFSEEELVEKAPLIHKYFHDDVQKKAMRNMILDEGKRLDGRRTDEIRPIWCEVGYLPAAHGSAIFTRGETQSLTTVTLGTKMDEKVKDEVLVQGTEQFVLHYNFPPFSTGEAKAARGLSRREIGHGHLAWRALKPMVPVGEENPYAVRVVSDILESNGSSSMATVCAGTLALMDAGVKLKKPVSGIAMGLISDSATGRWAVLSDILGDEDHLGDMDFKVTGTKDGITATQMDIKVDGLSYEVLAKALEQARVGRMHILGKLTECIAEPRADYRPFVPRIVQITIPQDMIGAVIGPGGKVIQDIQKTTGTTITITETDNKGVVDIFGLDKEAMDAALSRIKSIVAQPEVGDVYNGKVRSIMPFGAFVEIMPGKDALLHISEIDYKRFETMEETGLKEGDMIEVKVIGIDPKTNKLKLSHRVLIPQPEGWTEPERRPRERGDRPRRRPEHKEMKLSLLLVVVALTFSSCNCFKKMAKNSDDVSLTCAPEVLVLNNGVVAADITAQFPVKYFNPKAIVKVTPVMVFEGGEVAGTPKFFQGSKVKENYTVVDKKTGGVFTMHVEFPYDERMQISELQLRVEAKCPGSDEFTLVNANTGKVVKAKELEANPAIVRECGLVVAEGVNTLQQDLAYADAMAALPSDYKRVTTSVDKTEILYAINKANVTKKALKDADLEAFQANVDENLKNDRATQHVAVKGYASPDGPVKFNDTLSKERSESGDKVLAKLLKNSGLDIDVAAYGEDWEGFKELVSKSNIKDKDLILQVLSMYSSSTQREDEIKNMSSVFNELKKDILPQLRRSVIVNTIDLEGKTDAEMMALVEAGKLDQLNLNELLFVAESIAQDNATKNIVLAYAAEKYNDARAYNNLGIVLTEEGRTADALKCFQKAAQLGEASEALNTNLALANLANGNMAEAQKYAKGADAKAKSLVNAAQGNYNDAAKQLDGMNAAIANTMNKDYAAAKRAIAKDMSAEADYLRAVIASEEGDMRTAEAQLKSAVKKDEKMAKKAMKDIHFKKLFEEGLKFMEYANHLKEYAPAMSEAQVAEEMDRIRKAAVRNHTPEVYKLCYSAVDLTTLSCTDSVESVTEFAGKAVKFYRQFPHLPNVASICIYPPFVETVGVVVDGTDMRITSVAGGFPSSQTFLEVKVLEVAMAVENGADEIDIVLNVGKMLEGHYDEVANEVEVIRAEMSPEVVLKVIIESGALKTPDLIRKASLLSMFAGADFVKTSTGKIDVSATPEAAVVMCQAIRDYYRKTGRKVGFKPAGGVRSAEDAALYYTIVEEILGKEWLTPELFRIGASSAANNLLTAIEGREVKFFMKKVIHRAGTRGHSDHGWLDSYHTFSFADYHDPERIHFGALRVLNDDTVAGGEGFGAHPHDNMEIVSIPLEGELRHQDSMGHTSVLRTGEIQVMTAGTGIIHSEFNNSPDRPVKFLQIWVFPDRRGLPTRYEEITLAPARTNELRTIVAPEGNGSEHTAWIHQSAWFHTLNLEKDTYEYAMRREGNGLYVFVLEGDVTVENEKLASRDGMGIWEQNDITLHTDGKASLLLIEVPMRMSLDRTITPSATYIRTALPYKRYRGTLFATPSYNQSIILMAKINLKQYGITGTTEVIYNPSYDELYREETRKGLRGYEKGQVTEMGAVNVMTGVYTGRSPKDKFFVMDETTKDTIWWTSPEYKNDNKPVTKKTWKELKKIAVEELSNKKLFVVDTFCGANENTRLKIRFIMEVAWQAHFVKNMFIRPTDEELEKYGEPDFVVLNASKAKVKNYKELGLNSETAVVFNLTEKMQVIINTWYGGEMKKGMFSYMNYLLPLKGIASMHCSANTDKEGKNTAIFFGLSGTGKTTLSTDPKRELIGDDEHGWDDDGVFNFEGGCYAKVINLSKENEPDIWNAIRPNALLENVTVDKKGKIDFADKSVTENTRVSYPIFHIDNIVKPVSKAPAAKKVIFLSADAFGVLPPVSILTPEQTKYYFLSGFTAKLAGTERGITEPTPTFSACFGAAFLSLHPTKYGEELVKRMKQSGATAYLVNTGWNGTGKRISIKDTRGIIDAILDGSIDKAPTKTLPVFDFKIPTALPGVDPKILDPRDTYKNAKEWDEKAADLAGRFIKNFEKFTGNAEGKKLVAAGPHLKMKRHLMKHKFGLLPKVLLAIALGIVFGLFVPEWFTRIALTFNNIFGNFLNFVIPLLILGLVAPGIADLGSKAGRLLVITAALAYAFTLFSGFGTFFTSFGILPRLLGGTEMSAPGETAATPMQPFFTVEMPPLMGVMTALILAFVLGLGMAYIHSDKLKGMMDDFKLIIERVISKVIIPLLPFYIFGIFLSMTQSGQVSGILGIFLKLIVIIFVMTVVLLLIQFSIAGLVARQNPLKMLRTMMTAYMTALGTQSSAATIPVTLAQTVKIGVRPEVAGFVVPLCATIHLSGSMMKIVACSLAVMMLSGLDVSMGTYSGFILLLGITMIAAPGVPGGAIMAAIGLLESMLGFDENMIGLMIATYIAMDSFGTATNVTGDGAIAVIVNAIDSRMIRREKRMVFGWTIHASGPWADRVPDSDRIRFSEVPLHAVFLLTYKKGAIFVQRREYFLILSIMTALYSDIIFGPIHSRRLGLSLGVNLLPTQSKLCSFDCIYCECGWNAEHPGARRFNSREDVRTMLGATLRQMVSEGTPPDVITFAGNGEPTMHPDFEAIIDDTIVLRDEICPSARISVLSNATQIGRESVRRALRRVDNNILKLDSAFDDTVRLINNPCGTYSVAEVVKNMKLFDGQMILQTMFLRGECEGRTVDNTTEREVAAWLKLVEEIRPRQVMVYSLDRDTPCKTLQKVPREDLQAIAARVEALGIPCSVAMFALLSLALFACDKGIREEAIDAENILGRWRAVEEPDYDWDDSDDDGACDVPMYLGIMTFEHDGRGVADNGEHFAWSLTGRRITVDYGFIPARLTVSEICERRMVWKVLATEAGSVKYYGRIVFERLMEYRIVLNRMEFRAFHGCYDLEQQVGNRFTVDLEITAELGEVASEDCVEKAVNYLLVYETVREQMRVTQRTIERVSMNIMDALYARFPQIRHIRCTVSKLAPPLGGKLEKVSVVLEKMAIKNFVEELEWRGMIHSIMPGTQEQLQKEMSTAYVGIDPTADSLHIGHLVSVMILKHFQMCGHRPIALVGGATGMIGDPSGKSQERNLLDEKTLRHNQEAIKKQLAKLLDFESDAPNAAMLVNNYDWMKGITFLDFIRDIGKLITVNYMMAKDSVKKRFNGEGEGMSFTEFTYQLVQAYDFLHLYETVGCKLQLGGADQWGNITTGTELIRRKAGGEAFALTCPLITKADGTKFGKTESGNVWLDPRYTSPYKFYQFWLNTSDEDAKRYIKIFTLLDKQTIDDLIAEHDAAPHLRILQKRLAQEVTVMIHSQEEYEKAVEASNILFGGATSEALRKLDEQTLLQVFEGVPQYKIARAELIGLPFIELCAERSDIFPSKGECRKMVQAGGVSLNKEKVADPMRAIAESDLIDGKYLLVQKGKKNYYLVIAEMSDFIVSARKYRPATFSSVVGQKHITSTLKNAIERGQLAHAYLFCGPRGVGKTTCARIFAKAINCLHPEGAEACNACESCRSFNDGRSLNIHELDAASNNSVEDIRSLIEQVRIIPQVGRYSVFIIDEVHMLSAAAFNAFLKTLEEPPAHAIFILATTEKHKIIPTILSRCQIYDFNRIRVEDSVEYLKYIASQEGITADDESLNLIAQKADGGMRDALSMFDKAVSFCGQELRYQEVAQTLNVLDYDTYFSMTETLLSGNYVEALLSFDNVLARGFSGQTFMAGLNRHLRDLLVARNEPSLRLLEFTGTLMERYRTQAAACPPEFLFGAISLLTDLDGKIRQSSNQRLLVELGLMKIAGLGQKKNNPVDPVNLPLPELVRTAPAQSAPARPQSTQQTAPAPAPQPATVQRPTAATAESSPGIAASAPAATPAAKAAADPAPPATSAAARTSAMPTPSIQPVPERTQAAATPVSTQPQTARPRPVQSRLASGISISALINDAAPEPDTETAVHAAAPQPVIDPLSAEKLETTREKILTLVREMRPRFVAAFERMQFQGHVIRIAVPSEALREEILRNKTELLLRIAETSGVQGMLELDVTINEEIRAARPIKLEDRVKYMTEKNPLLAELRRALDLEVEMKKLILAITASLCIATLISSCNNLGINAPKMDSDEATQLIVETLEKNINFDEWKIYEIRWMEADELENNLTVLFVEMVNKAGDCFSQTFTLSGPGKGNISDLDEAGGLRGKLDFEKVKGLTPASINVEAIRKQYEEAKAMIPENYTFKSIGDYLIQETVPSGNEFLDRNKTFGEVKAEFSMNITENGKEIVESAGKKSVQYYEVTFNVLPDGSVQMEEMNINSLTIKAQEALQAAVSLAREQGNQAVEPLHLLNVLVREDDSLSVFLLGRVGVNVRGLRGEVERAVRGLPHVSGGGEQFFSQDTTKVIQRAVDFTKNFGDKYASIEHLLLGLIAERGTAADLLKGAGATEKELLEAIRVFRKGATVDSQTASQEFDALGKYAINLNEMARSGKLDPVIGRDEEIRRVLQILSRRTKNNPMLVGEPGVGKTAIAEGIAHRIVNGDVPENLRSKVIYSLDMGALIAGAKYQGEFEERLKAVVQEVTASEGEILLFIDEIHTLVGAGKSSGAMDAANILKPALARGELRTIGATTLDEFQKYFEQDKALERRFQKVMVDEPTAEDAISILRGLKDRYENHHQVRIKDEAIVAAVELSQRYITSRFLPDKAIDLIDEAASKLRLEMNSVPEEIDVLDRRVRQLEIEREAIRRENDKERVEQLTHEIEELGAKRAELRAKWEGERDVLKKIQENKDRIEHLKIEAQQAERQGDYGRVAEIRYGKIQEAEKQIAALQDEFRAASASGAMIKEEVDAEDVAEVVSRWTGIPVSRMLASEREKLLHMEEELHRRVVGQDLAIAAVSDAVRRSRAGLNDPRKPIGSFIFLGTTGVGKTELAKALAEFLFNDDNMLTRIDMSEYQERHSVSRLVGAPPGYVGYDEGGQLTEAVRRKPYSVVLLDEIEKAHPDVFNILLQVLDDGRLTDNKGRTVDFRNTIIIMTSNMGAQVIQENFAPAFDGNKISPEVVEKTRLEVIEQLKMQLKPEFLNRIDEIVMFEPLTHEDIGRIVDIQMNIVRKLLKENNIELDYTKKAKEWIARIGYDPLYGARPVKRTIQRYVVNDLSKRILAGDVNREHPIVIDADADGLTFKNMVDIFERLEKNAGGPIGMYMGYAHGYFAFPKLEGEIGPHMTFRGQKMLNWSLNNYLGLANHPEVREADAKGAAEFGMAAPMGARMMSGQTKYHEQLERELAEFVGKPDAFLLNFGYQGMISIIDCLLTPRDVVVYDAEAHACIIDGLRMHKGKRFVYGHNDMASLRLQLKHATELAEQQNGGVLVITEGVFGMKGDLGKLDEIVAMKKDFNFRLLVDDAHGFGTMGPHGRGTAAHFGVVDGVDVLFNTFAKSMAGIGAFVCGPRWLINLLRYNMRSQLYAKSLPMPMVIGALKRLDLIRKHPEYQEKLWEITRALQGGLKENGFEIGVTQSPVTPVYMKGGIPEATNLIVDLREKHNLFCSVVVYPVIPKGEIILRLIPTAAHTLDDVKFTIEAFKAIRNKLESGFYRDKPMPMKADEGFSVRMQGGGKSNAAYPVTNSKYLYYFSRKESGRFEHPDNYFYFCGLLKRIILKSNNELVWMFPNNDKLFVGSILIFRNFRAKFVRTIPRVVFVFEKHFLTLPCLPVWAATYMLNVLAKADSFQYISGIQPFLMSLKGRKYYVYVKNLSSAYFKDRPDTTRAQLPIKDEFSEIKESAYPFIFLGYDRINDVLVCWNFHIAKKRLNERKSVSFYSRTFFQEEVSPGELLRKRLKNDDEPVFFKRKDLLMFFENIDSFFENSSPKAQVITHTPSIENGKITTISDVKLLEKLRPLLAIDTPHTLEAIKVVQAHYGDSPEMKFRDWANLVKAVKFDQEKTIDTVNCELIRLPSTKQMKVSLHSIFSKLQTKILTEHNCYAADNIPFSDTHKIGISYEGFPIFFIASSNISSLSNIKLDLISIQFNQLCRLKLSNTDKPIENYYTIVALQTENVDYINYFIDVVEIVLSKLGNYPTQKQLHDEIQKLVDLFRCFNLPPQKTIQGLWAELFVISIASNPEYLLKAWHSSLNDVYDFNDGIDKIEVKSTSKSHRIHKFSYDQLSPTENTNLIISSIFVIQSGIGKNIFDLKEDIETQICSLELRYKLNEIIFRTLGSEFEKVYDVYFDYQQAVDSYKLIPAIYIPSLNSESIPNEITNIHFDCDLSQIDVPDNIAAIYPHSKLFSSLMEIEILNTHKNDFSPVIGERTMELLSRFGQKLDEDGIDTLSSETIEILSHCTNPYKNEVQSVTNLVVGYVQSGKTMSFTTLSALAHDNGFRIIIYFAGTKNNLLSQTTKRLRKDLINGSANSAYYKLFENPTLEYAQRIRNALNISSKPTILITVLKHHKYISDLAAMFNSMQLKQTLGKAGVLIIDDEADQASLNGYAYKNSKSEEWEDDEYTTTYSSIMKLKGALANHSYIQYTATPQGPLLISIMDLLSPKHHTVLTPGKTYTGGKTFFCDEPGLIITIPEGEVFHSKHNNLADCPDSLVNALQLHLMGVAIIVKLLQKESFLSMMIHADRDQDASEKFYRWIKNIIDAWSNILANGEQDLGYQELKDSFAKCYPESIRMYEAHNESAPSFEDIWCCIDDIILDTNVELVISRNKRQGENKEIDWASSCSHILVGADMLNRGFTVEHLAVTYMPRCSVGKSTADTIQQRCRFFGYKQNYLWSCRVFLPFEVIIEYKEYVEHEEEMRKWLLDNKNLEDVERLLLISNRLNATRKNILSKHTVTTKLNGWRKMNAFQAIDENTTFVNRFLADVELKLFENYGTDDRNHGYVKLPIQRIIEFLTEFKFQNMPDAARKEATLRYIKYLSTKKQGALEYAYIIQMAYRGIPRERAFDIDTFRINNLHSGRSMSGSTVYPGDANIKFEDSICIQIHHVKLKCNSTQWAGRTAYTLAIYYPEEFAINYVETEEMEMKQINKVSIALKPNVYSTFRNLNNTVSNTLGEYVDNAVQSFLNHKTELFDLESNYKLRIEISVDWENRTILISDNAAGIDAVNYQRAFEPAHIPLDDTGLNEFGMGMKTASVWLANKWCVYTKALGEDVERFTEFDLQKVTTEEKEELVVIEKNAPANEHYTRIILSQLSTNAPKPGQMEKIRRHLSSIYRQFLRTGNVEIIVNGQSLEAPDYGILYAPFYKTPDGENILWRKEIDFEMGEYKAKGFIAILDKIQNGANGLVLMRRGRVIVGGGDERYFPTVIFGQSGSFRYRRLFGEIELEGFEVSFNKNGFREEEDLYLFMDALKDELKADNLNILGQTDNYRQRGKDQYTKISKAIKKDLEKKAKPKQLSRQVSEVEAKISNQQYLQKNEDVIINAKPLDSYSESFQYNGKNYILTMDLVTETETDSLYSVITTDTEENLFLDTKSISCKINLAHPFFTRFEHFKKGQDYAPIVAIFKALTLAEIMAPDKGTKFASNLRILFNQNILQMPTYKFIDLFAGLGGFHLALEQLGCKCVFASELQQDLRTLYESNFGMKCAGDINLINIEKDIPSHDILCGGFPCQPFSQAGKQQGFQDEKERGNLFNKIMEVLEFHKPEFVFLENVPNLKSHDKGNTYRVIHEKLSMLYEVKEDIISPHYFGIPQHRTRMYIVGRLKSRGGLQTFAFPKHEERPDCDISQILIPEDTDYMSLRPVTRKHMAAWQKFLDLLSQNKSTLPTFPIWAMEFGATYDYEGVAPYFQKRQQLSGKKGKFGEDIVGNSKDDFLQLLPIYSQGKPKTGRQFPDWKKQFIRQNRQFYQDNKSWIDAWIDEIKQEGFENSHQKFEWNCGYEEHPTIYNKIIQFRPSGMRVKLPTYSPALVLTTTQIPIIPWLITPNGEKGRYMTRKEGAKLQCMEELAEYPDTIASAFKAFGNAVNVEVVKRIAINLLFDGNETNKMILRQISKYIFEIDLEYKEISYLCRKIRCMEYKNRIADQLLRDKLEAMGAVLIEGPKACGKTTTAEQQAKSVIYMDDPTKQQQYRQMAQTNISFLLEGETPRLIDEWQEVPQFWDAIRFEVDHRDEDGQFMLTGSAVPVEAKEIHHTGTGRYGWLTMRPMSLWESGDSTGEISLSELFLAPDKIGALNKLTLPVLAFVVCRGGWPKALQKKTEKAALLQATEYYKAITNSDISRVDNVKRDAERAKRIMRSYARHQGSQASIATILADISTNEPEDVSDETIDAYLTALRKIFVIEDMPAWNPNLRSKTAVRTSDTRYYVDPSVGVAALGLGPNDLINDLNTFGLFFETMCIRDLRVYADALDGSVYHYRDKNGLECDAVVHLRNGSYGLIEIKLGGEKLIEDGAKTLMALSNIIDTSRMKAPAFCMVLTGVGDFAYKRTDGVYVVPIGCLKNMPRVKKPAKVKEPIRLRMKELANGNKSLYLDIYRDGKRTYEYLKMYLIPETDNNARVRNQTTMAAANAIKSKRIIQLTNGEAGIETREKVFLLDWMETYKENQAKRGKKDGNQIQVTIRILKNYAGERVTMDQIDKAFCQEYIDYLLTEYRPKGKQVSNFTLHTYYRILNGALNAAVRAEIIKVNPFTKINNSDKIRLPESKRSYMTIEEVRALIAAPMKNEAVKQAYLFSCFCGLRISDIISLKWKDVFVDRGQYRLAVSMQKTKEPIYLPLSPEALKWMPERGEKTSEDHVFDLPSPTMINTLLKPWAKAAGIDKRFSFHTSRHTFATMMLTLGADLYTTSKLLGHADVKMTQVYAKIINQKKDDAVNLVNGLFDMNNSDLSFLTDCSNEQLRLLADVLVFDPKDHKKRYTERLSARASYAVYYPHDMKKLLPEIVDEYQRFGGNTIANIIRGHGVPYREILKDVCKTVGIAKSDTDTVEIMEAALLKTVADKMLEQIAKQNASGEQSVEEMKKYVEEFTHYPDQMTELILMSFSSWLSHMGVRLVIRYASGRVVMVPLGPIAWAITAAWMALDFASPAYRVTIPSTILIACLRHIHNKSERDSNISFSIEMVIAVFAYSNVRFHKKFSRTSLQVRLNRKNTFIQEKFAMSTKHHNLSQLDAPLPSAADMKFGIVVAEWNREITEALLEGAVQTLRSAGCSDLNIQIKYVPGTFELTLGTQFFAEYTDVDAVIALGCVVQGETRHFDFICQGVTQGITQLQIQWNMPVAFGILTVNDQQQAFDRAGGKYGNKGNEAAAAAIQMVKLQTDMEAASPNTVPDRKNINMTKQNEQEALGTAMNKTEMFFEKNSKSMIIALLALFVLAAAIFGYRQLISQPRERKAAEMIAQAQYRFESTTPEYQLALEGDANGPGFLDVIDQYGSTRAGNLAKHYAGICYLRLGDLDNAAAYLAKYKPAKGIPAEIVNAQNIGLQGDIAVEKGDYAAAIKLFEKAAKVSDNNLTAPMYLRKAALAANAMGNKEQALGFAQRIQNEFPASAEAQNAEKLMGTIQQMKRSKTVTVGELLDEFFQRPYVAAKVAEGRLRDTWREIVGPAADAETTELRLENHILHVRIRSSILRNELFYQREALGAEINRRSKIRLVNAVIIRMYLKKLSLINFKNIREENLEFRPGINCFVGDNGAGKTNVIDAVYFLSMCKSSLAMTDGQNMRHGSDFFLLDGQYLTDEGRSESVVCAFARKGGKTLKRNGKEYERLSDHVGLIPVVIVSPADTMLISDAADERRRYLNGFISQLDRAYLQALVRYNAVLGERNRLLKISRDEQMLCIYDRQLVEQGGIIHRKRSEIAALLEPEVARYYRHLSSDREQVTLEYRSELNDTPFEELLLKSREKDFVNGFTTAGIHRDDLVLRIGGYPLRKYGSQGQQKSFLIALKLAQYALVAQAKGEKPILLLDDLFDKLDAGRVEQLIRLVGDDGFGQIFITDCNPTRLRTILDKTGDDYSLFTVENGGIVRMAAAPDDEGGRVKLTQGESDHGEIHTSEQCTVGNIAYQLRRKTLHDSPRIMEVILIKDIENLGYANDIVNVKPGYANNYLIPQGYAKAATAAAKKILAENLKQRAHKDAKILADAQALAEKIANLPLVIAAKAEEGRIFGAITAADLAEALAAKGIEIDRKTIAVENIKTLGEYEAVAKIHRDVKATIKFTVTAEEMAQENNNQSEIRYLNPVSVDVKKKKYCRFKKLGIKYVDYKDGEFLKKFLNEQGKILPRRLTGTSQKFQKKVAQAVKRARHLAILPFVTDCMKMNNYETVFIVTPVLSDAQVKEVADKFQGVITENGGQIVNSEAWGLKKLAYPIQKKTTGFYFLIEFTGEGSIVNTLETQYRRDERIIRFLTFKQDKFAVEYSEKRRAKLSNKQEEMLNIVLFGAPGCGKGTQAARLKEKYGIDHVSTGNVIREEIARGTKLGKEMESYITTGRLAPDQVVIDMIADYIAAHKHAKGNIFDGFPRTTHQAEEFDRMLSEQGLKVDVMIYMDVPEEELVKRILLRGKESGRADDASEEVIRDRIKVYHEQTAIVADFYAKQGKFADINGLGTMDEVFDRICQVIDSIRKMYLPHTDSLPVRVIVAAKFEKSALYLTKIPKLCRFDKKRLYLLALKNSMADKKPTEIASLGEFGLIDHLTDSFSVRNASTLRGVGDDAAVIAAGADEVTLCTTDLLLEGVDFDLTYFPLKHLGYKAVVVAVSDLLAMNGRPEQLLVSLGVSSKISVEALDDLYAGIRFACEEMEVDLVGGDTKASVTGLAIHVTALGRARKEEVVYRGGAKLHDLICITGNLGAAYMGLQLLEREKRVLRGVKDPEPEFKGNEYLLQRYLKPAARKDIVELLAEEKIVPTSMIDLSDGLASDLLQICKASKCGARIYLDRIPIARQTTAFAEEIHTDPVVAALNGGEDYELLFTVPLALQERVMRMGGVDVIGHITAENTGAYLVTPDGGEIRLKAQGFRDKEMFQNPKIVLSPTYAYLQQEIRKIPAGDYRILETYCDRRNMVRKIELAGGRIFVLKQYKRPTRLNQFAYTLFRKSKACRAYEYALRLQQLGFETAAPVAYLEISRHGLFHTGYFLSEFIAHPLLNTLQEGDEESRKILEDFAAFIVEMHEKGVFNLDMNPGNVFFYKSGEKYRFALIDINRIRFCRHLTRNDCVEVFKHLDNLPPPALSVVLVRYAELRQWNPQILCGAVMLRQGVNLPRRIKTGFRSLLSHLGLRKMANHKSSEKRIRQTVAKRAHNRLFHKTARNAVKALRNTTDKSAAEALLPKVTSMLDKLAKHNIVHKNKAGNLKSSLQMHVNALMQIYELLPYKKMKSKYFFTLRQKTGLKSPVIPFLQCQSTLLSAMTIPAFYRGQFSKRAIFVVFFIFKDGYREGMGFIRGLMNVKPLSDRVLILPNPAEEKTAGGLIIPDTAKEKPLAGKVIAVGPGTSEIKMEVKVGDQVLYGKYAGQEINVDGTDYLIMKQQDILAIIMAKEIKYNVEARELLKEGVDALSNAVKVTLGPKGRNVIIDKKFGAPQVTKDGVTVAKEVELEDAIPNMGAQMVKEVASKTNDDAGDGTTTATVLAQAMIGVGLKNVTAGANPMDLKRGIDKAVGVVVDSLKKQSQTVGTDFAKIEQVATISANNDGTIGKLIAEAMGKVNKEGVITVEEAKGTETHVDVVEGMQFDRGYISAYFITDTEKMEAQLDKPYILITDKKISTMKELMGVLEPVAQSGRSLLIIAEDVDGEALSALVVNKLRGTLKIAACKAPGFGDRRKEMLEDIAVLTGATVISTDKGMKIEDANLSVLGTAEKVTLNKENTTIVDGAGSKDAIAARVAQIRAGIEAATSDYDKEKLQERLAKLAGGVAVLYVGAATEVEMKEKKDRVDDALAATRAAVEEGIVPGGGVAYIRAVEALETLKGDNEDQTTGIQIVKRAIEEPLRQIVTNAGGEGSVVVNKVKEGKGAFGYNARDDRYEDLLKAGIIDPTKVSRVALENAASIASMFLTTECVLAEKKSDAPAMPAMPGGGMGGMMMRFRELFYSGLSCMKSGEPFSGRRAFCGSYEYDAACCWKDIRKGLGEIPMAFHTRLMRSMKCTDFENRIELLFDDNTPAEVRREMLEHLETCPACAEFYRQTKAAFNAVAPRVEVQAPAGLKARILKTAAQAENTPATARTTAPARPRRLWLRPLSATLSAAALIALVLLVFDPVGRYRAHAAGRIFRDAAAQLDKSRSFRLEMNVRTLPQENFSYIDAEVPFVPHRMWVEPGSGRWRLEKAGRIALSDGERILMWSPEINSGFIMRPGSGAIEDFATLLDPYTLLLREELNFAERRNASYSKQVGPETITLTVEAPAEGDFSNDYLSGTSIDESDTRREYRFDRTTGRLIGLKIEQTDGKTPVTIAELQRIVYDIPLSDTLFRAYDGIEWIDLTKPVGGVHFAAIAPEEAARTLFAAMQTWDTEILAEGLVFYPLDLMKERYAGCRLLETQPAFRSGQYAGVFVPCRVKMSDGRIEKIVLALRNDNPTGSWVADGGLMQETKLKLLERIVDRRQDSLYRFAYIRTGSQADAEDIVQDVLLRLFHSDCNLDRIDDVERYLWRAIANRCCDYHRHRRNATLPTERAAALADDSGDQELREEYERIAGLLATLPEEQAEVIRLKTSDSLTFARIAEITGTTEATVKSRFRYGIGKLRKLINHMPIYFCLPASDGRVCCGFCGTGISIKDMATRYGRISDGEMPALMRGIKRNVWKESSEINSRYISKGYKYNTPEHAAKPNVASTLHSGRIADAMGEIIADLSQTMQVVDITHLPQVASKGDTHFVVYKDAEGSHIRRLDPEERITEIAKMLSGSQITEAALAQARILLDKMKLKDLAFIGAVVLLLAPFFLSNDLYAAYLACNASHPYLMALLKFGILSTAGEVIGLRIKTGRYNEPGFGILPHAVVWGFLGVWIAAMMKTLSIGVPAVAESFGIEGVAAAMKGELTPLKFIGALLISLTMNTTFAPVFMTLHKITDTHILNNGGSLRALVRPIPMRRIISSLNWEVQWGFVFKKTIPFFWIPAHTITFLLAPQYQVLFAALLGVMLGILLSVAAVAGRKMLRRLKVENYALIDRLELELDDRLNIITGETGAGKSILLGALGLLLGNKNDNATLKDDKRNCLIEGVFDLGTRDLQAFFDRNDLDYSRETTLTRQITPAGKSRSFINDTPVPLALLRELGSQLIDIHSQHQNLILGSEAFRTQAVDTVAENHDLRMQYTTLYERLCHLRRELARLREEAEAGRKDEEWLRYQVEELAAAHLKEGEQTELEQELEVLSNADRISETLTALRNALDDEQIGVLVQLKASETACRHLEAGYPFAAEAAGRLRSVLEELKDLGASAAAQSERLDADPERLQKIGDRLNTIYSLCQKHRAADLGELLAKQTDYEARLQAITHGDEAIAAVATELTATEEKAEELARNIHATREKAAPTFNDAIQTTLARLGMPEARFVVQLTPAPALTPTGDDEIDFLFTANGNFAPQKVERIASGGEISRVMLALKALLAHRMELPTIIFDEIDTGVSGRIADAMGEIIADLSQTMQVVDITHLPQVASKGDTHFVVYKDAEGSHIRRLDPEERITEIAKMLSGSQITEAALAQARILLKPMSLEGRHILLGITGSIAAYKAAILCRLLKGAGAEVKVVMTPLAKQFITPLTMATLSKHPILVEFFNPENGEWNSHVSLGEWADCLLIAPATANTLGKMAHGIADNLLLTTYLSARCPVAVAPAMDLDMFAHSATQENLRILRSRGVRIVEPAEGELASGLSGKGRMAEPADIVAFVEDLLSEKKKSLRGKRLIVTAGATIEAIDPVRFISNHSTGKMGYAIAEALARRGAEVVLISGRTSLPTPTGVRRIDVLSAQEMYEASVREFATADGAVMCAAVADYTPEEVAPTKLKKGDGELTIRLKRTHDIAAELGAHKAGRILVGFALETDHEEANAEGKLQRKNFDFIVLNSLRDAGAGFGVDTNKVTLIDRAGREELPLLSKAETAEKIADKIESILKMEIKKSTPTNTVTRKLVDLDKETGNIYETVNIIARRANQISTELKAELTRKLADFSSPTDTMEETFENREQIEISRYYERLPKPVLIATEEFLDGELFYKENKPQAMRKERLYVLCTVCFAILAAGCNSVQQVLKSGRPDHMYQTALKHYQNQKWSKAAMLFEAAAPYYSGTMQEDSIAFMTAFCKFKTRDYEVATSMLDDFRRKFGRSVFLEDAEGILALSYFYLAPGPTRDQTMTTQAIVAVNEYLAHYPNSSRSDEFREMDKILTQRLHDKTYLNAYTYYKIGRYKSAIVALKNALKLYPTSSHREEIMYLIVKSGSKLADNSVQDKQADRYLSTLDSYYSFVAEFPESHYLKELDRLAQNAKDFLDRNNKEKQMAHRTPRLTEQPENHGGTPIRPAVVFPQKTVGIASIPQRPHMKLAIVGASGAVGQEFMNILEESRLPIDELLLFGSERSAGRKYPFRGKELTVRLLAHNDDFCGVDIALVSAGGSTSKEFAETITKHGTLMIDNSSAFRMDEDVPLVVPEVNPEDALNAPRRIIANPNCTTIQMVVALNALEKLSHIRRVHVATYQSASGAGAQGMAELEEQHAALAKGGEPRVEKFAYQLAYNLIPHIDVFTDNDYTKEEMKMYHETRKIMHSDIVVSATCVRVPVMRAHSESIWVETERPISPEEARDAFASAPGVVLQDAPGDKVYPMPLFAAGRNPVYVGRIRRDLTSPNGLTFWCVGDQIRKGAALNAVQIAEWLIAHRAMKKQTPHKPLPKSVKWLWGIVFAPFALLLLLLLLTAAGLFGRLPSFEELENPKSNLATEILSSDGKVLGTFFVQNRSYVQYDELFPLDSAQLLRLDGYDVPPIIAALVSTEDVRYRGHSGIDLMSLVRVGVKTVLMQNTSQGGGSTITQQLAKNLFPRDINENRGKIARTTKLVVSKLKEWITALKLEYNYTKEEIAAMYLNTVEFGSNAYGIKSAAHTFFNKEPHELNIQEAALLAGLVKGPTMYSPRRNPENALARRNLVLDRMASAGAITRHQRDSIAALPILLNYKPVSHNEGPATYFREMLRLTMNAERPKRRQFQNDWDYEQAVKEYDENPIYGWCLKNTKADGTPYDIYRDGLKIYTTIDSRMQEYAEQAIQKQMESVIQPQMDAQFKRTKTLFIDADRQERERIMRNAIRYSDRYYQMQKAGVDEKTILASFDKPCPMKIFTYKGERDTVLTPRDSILHHKRIMRASFVAMDPRSGYVKAYVGGPNFRYFKYDMAKQGKRQIGSTIKPFVYTFAIDHLGLSPCTPVPNLPVTIETANGVPWSPKEAGKVEQNGELHPLSWGLARSRNNYSAWIMKQAKQPQAVANFIHNMGIHSYIDPVPALCLGTSESNVYEMVSAFSTFANEGVYTTPIFVTRIEDRQGNLIASFAPRTQDAISEHTAYTMLTMLEGVIRSGTGGRLGWAYNMQNVEVGGKTGTSQKNRDAWFMCVLPKLVAGCWVGGEDQAVRLVSRGEGSVIALPIVGEFLNRIYADPSTGISKQDLFTRPAVMPVYDCDETEKTDDSATRYEEDEFFEMTRPAPMRRFAAILFLLGFLFIGGKSVRAQYYSWGADAAALRWKHLRTEDVRVVFPDTASALAHRTLYYIQAVRPTITHGFSHPPLKIPFVLHTENFQSNGLVMWMPKRIEFLTTPSVDSYSMPWVKQLVAHEYRHAVQYNNLNRGLIRILSYLIGQQGSTVGLLFMPLWALEGDAVMNETEMSSYGRGRQPRFTIEYRALGYEVLRRRNCDKWFCGSFRDFVPDHYQMGYQMVAYGYDRYGDGIWDKTLRYGVRNAYMLTFSTSVALRKFYGTGEGILFRDAFADLNRFWDSLPKVTDSGRTLTPLPEKNYTTYTHPVSLNDTTLVALKTDFDRPSRLVAVDSRTGRERRRTWTGLVSSRPTTDGQRVWWTEYRRSLLFPERVNSRLVVLAPGKKRPRNAPKLRNVLYPTPIGRSGALAWVEYTPDGHYTIVAEDSLRQRTAWPMPGFSEVHGLAWDNATERLYTLVTDNSGMWIGRIEPGEGLQAVTRGAYITLSDLRAADGKLYYGSIASGRDEAHCFDLGEGREYRLSTSTYGSFAPAPADSGAVWTTTYDRKGYRITRQENIEPIPVAPSQLPVDLVNPPRRRWNVVNLDTVRYTPADSASLHRKYPARRYRKGLHLLRAHSWAPVSFDPFKTIEEFNPRLMWGATVLSQNLLSSTEAFASWGWSRSDGHVLKGTIRYSGLGVRLEARATYGGDRMTYGIAQRGADGKAERQPAPAHAKYWSAAAGATLPLYFDRGRHIRQLSLSAGWEYSNGMVADVDAIRYDAEGRIANLQTLGYREGLHKLSLGIGFSDVVRAAYRDVGTPWGYTLWAGYDLNPENRNFSDLVSAYARIYTPGFFRHNSLSVAAAYQTSVGGYRFPSGLRFLGYKSTRLLPRGFSSSDISSNNYLAGSVDYQFPLCYPEGGISGVIYFKRIRLNVGADYARFQEFGSRGKTWRDIYSYGGDLLLDLNILRMSAAATATVKLSLYKPSEGSCWFGFGLELPFMVYSTNPNFKYDTEEAPQIETLAPERQDLRVWLDRKQRGGKTVTLVKGFVGSDADLGELARLLKTRCGVGGAAKDGEIIIQGDHRDRVVEILAKAGYKCKKAGGMKYAVVVLFAGKAGTFATKYFCKYSVSRGLRQIYLSQDGRRLFMFRKTYQLTFVLILNALSCLAQSGLVFDRPAWDFGTIRETDGPVTHRFVCRNEGEHPEVILQVTTTCGCTTPRYTRKPILPGEEAEITVTYDPANRPGNFSRKLAVFTADRRIAAKLRITGSVIGRPKTPEELYPIDCGDGLRLEDNFHAFTYIYNGRTSVATIGYANLSDKPLTLELRPEEASGLLQADYPRRIAPNERGVLTFSYDLPADNPRYGTLKELLTVCIDGRPTRTDIFLHGFAVDDPRRVEQENAPKWQVNKNIINFGPVKRTGAPAERSLTLGNYGKSTLIIRAVETPKGVGCSLRGGERIEPGQACEIVVTFDASRRDYGLWSERLILIANDPARPMQSIRLTAAVEEMYTILEKRVLAENIYLMRIHAPRVARAAKPGQFIIVRIDEFGERVPLTISDYDAEQGSVTIVTQAIGASTRKLCALEQGDALADFVGPLGHPSEFIHEDLDTLRKKRFLFVAGGVGTAPVYPQVKWLHEHGVKADVIIGAKTKSMLIYTEEMARVADNLYIATDDGSEGFKGMVTALIKDLIDNRGKQYDVCVAIGPMIMMKFVTLTTKEYSLPTVVSLNTLMVDGTGMCGACRVTVGGKTVFTCVDGPEFDGFQVDFDEAMRRQGMYRTQEERARAIEQERENGHKCRVGLDKMANKIPRVPVREQDPKVRATNFEEVCYGYNVEEATLEASRCLNCKNPRCVAACPVNIRIPDFIHQVVEGNFAAAAAVISEDSSLPSVCGRVCPQESQCEGSCVLGVKGEPVAIGKLERFVGDWKIENADKMPAPDIKRNGHKVAVIGSGPSGLACASDLARMGYEVKIFEALHKVGGVLVYGIPEFRLPKEKIVAREVEAVKKLGVEIETDVIVGRTVTIDELMNEEGYEAVFIGSGAGLPRFMGIPGENLNGVVSANEFLTRTNLMKAYDTHYDTPIYVGQRVVVVGGGNVAMDAVRTAKRLGAEATIVYRRSEKELPARVEEVHHAKEEGIEFRMLTNPTSIIGDEKGWVVGISCVEMELGEPDESGRRSPIEKAGSDFEIPCDVVIMALGTSPNPLLKMTTEGLETNRKGCLVADEKGATTREGIFAGGDAVTGAATVILAMGAGRKAAKSIDEYIRQKKHMRKFCFAAFAAVLIGTTACTPKAPEQFTGKIVDGTMNTVTVESPADGRRVTFTTEDADMQEAYGLLLGNTATVTYRGKLGETTPALKVVTDPAYVTAIGRWVEPNPIAPEQEQGIEIRVNGVAASINMLTLRYEAWELAPEGDRIILSGVSEGSGGPYPFEQTAEIIEMDGKPALKIDAVVLTKKDLIMPRKNKKLPRHLLVIRTSAMGDVAMLPHALRALKEAYPEVKVTVATKSLFHPFFEGLDVGFLDIETRRTHRGIRGAIRFAREAAELKIDAVADMHNVLRSKMVRAALHLRGIPVSVIHKGRIEKYMRLGRGSEGVKPLKHTVIRYCDVFRRLGFDFPDPRPAEKRPRPNPMGEKRGVWIGFAPFSAQPGKTYPEKLSAEAVRLLSGRFDRVFVHSGGGEEAEFARRMEALYPNVTALYGKIKLGDEMNLISNLDCVVSMDSLVMHLASLMATPTVSVWGATHPGLGFLGYGFGQEGVLQTDFACRPCSVYGKKPCKYGDYRCIWSIEPQMILDRVERLVGKTEMFTQNANKIFDQVIDDYHRYDDVDHQPSNPYAEGTIDHLLYMKNWVDTVQWHLEDIIRDPQIDPVEALKIKRRIDKSNQVRTDMVEYIDSYLLDKYKNIDVQSGARINTETPAWAIDRLSILALKIYHMRQEVLRKDVDEAHRAACQQKLDVLLSQQVDLSTAIEELIEDIEAGRKYMKTYKQMKMYNDPALNPVLYAAKKMNFYHKAISLAGFVLLTVLPVQAQVRQTREEYINKYKKIAVAHMERYGIPASITMAQGILESDCGNSWLSQASNNHFGIKCKRNWTGDVVYYDDDEKGECFRSYPSVEASYQDHAEFLDSQPRYDSLFSYAPNDYKSWARGLKAAGYATAPDYAQRLIRIIEESKLYLLDREDGLTIYGAQTGHLTDDWFSGQSNVDQAAAIASGAVDPDDYRVTVNAHKGYNVYRTNGVNYILAHDGDTFEKISRDFRISARNLRKFNDVSKNAQPVANEVIYIGRKKKRWDGNVLLHTVREGETLWSLGQSYGIRTKSLARLNKLKEGDALTPGTTIKIRMESIPLRKKILETIVSKSTLKQKVFDNTFATFNDLKETLLEMASEMDDQLDGLLDRRVRLEYRDRGKFEAQIQVANDLLIFQMHTDVFEFEPNHVIWQNPYVQTDRDNSYCGVINIYNFLSDSFKFNRNADEGYLIGRIFINREKCYFVEGKQQTSMRPMQFGKAEIDSEALVRILESAIYYALNFDLLLPSYDDNKRVTVDQFNTKLDNSKFVTGKRLGYDFDVDDIMLKKLLLLTLLGTAFAAQAEAAAPSTYRDIARLRAMNQRAQGIRPAADGKSYTTLRGNAIERHSYTKDAPGELLFEWKNDKENRDIADYQFSPDGKLLLLSIGSEPIYRHSYTTDYYLKGADGLRPILTDLPGTRDASFSPDGRTIAFSSGNNLYLYDIVGDSVRPITTDGAWNRIINGTTDWVYEEECAFTKAYAFSPDGQKIAYLRFDESRVPVFEMMRYDGKLYNEAYSFKYPKAGDANSVVDLYVYDLKTGETERVDVGPDRGQYILQPEWTPDGRLCFQRMNRRQNHFEAVLCNPDGTQQVIYDERSPKYVDHLNKTFYFLEDGRRFIVREETSTGYMHLYLYGIGQGVLHPITQGEWEVTDFVGLRSDKVYYISTESSPLKRDLYRIGLDGKHKERLTPGDGYYSIYPSADLSYYICEGGGSSAPGRTDVFNAAGKRVRTLYDNAPLKEALAEAGLPVREFFTFTTERGDELNGYMLKPLDFDPAKCYPVLLTQYSGPGSQQVAEVWGPDWEDALVTHGYIVVCVDPRGTGYRGEEFKKLTYGDLGRLEVEDQISTARYMARQSWVDPARIGIYGWSYGGFMALGCAFRGEGLFKMAIAVAPVTSWRYYDSIYTENFNGLPEDHPKGYDDNSPVNLAHLFRDDSTRLLIVHGTADDNVHFQNTMEMVRALNKLGKQYDMMVYPDQNHSMMPDDMIHVREKMLRYTLENLMKNLLLHPTPIGTVGIVENGRAITDILFEEQLPGHAVRHTTLLLERAAKQLDEYFAGKRTSFDLPLEPEGTPYRKKVWQVLTEIPYGQTMTYGEIARRTGNPQASRAVGGANHHNPIPIVIPCHRVIGAGGKLTGYAGGLPRKEFLLALERNRLPKMKKYRCTVCDYIYDPAVGDPDSGIAPGTAFEDLPDDWSCPLCGVGKDMFEPAMATTADIKIGMCIELDGKTFQIVDFQHVKPGKGPAFVRTKLKNLENGRVLENTFSAGAKIEPVRVERRPYQFTYEDDLGAHFMHTETFEEINIDKNLIDNYDLMADGQIVEVMFHTEKESVLSAELPPIVDMEVTYTEPGIKGDTASTNSLKPATVNTGATIKVPLFINTGDKIRVDTRTREYYERIKMKIVVAVTAASGALYARLCLEQLLRAEEVSEIALVYSTHASEVADFEGVTMPEDPRIRIFDNDDLFAPPASGSADYDAMAVVPCSVGTLGRIACGVSQSLIERAADVMLKERRRLVLVVRETPLSLIHLRNMTALTEAGAVVLPASPGFYARPSSVEELCRSVAERVTALLGISGPRYRWTGEGRSAGRNDSDSEKMQTNYSSVFFSKIDNSIKSCKYFRTKVPAETAVSTGSESQPFDYSSQNRFNSAISSAQRNSSGVSRISGIFRKGGIHIFHFAYKANAPEDRLLKIGDFVLSLSMPYSAGVFFLVMKLKPPKIIRHLFPSLIWEIDDPEGVFLTFDDGPTPGITEWILAMLEKYDAKATFFVLGKNVEAYPDLFRRIVDAGHKVGNHTYSHQKGWGMSLERYIEDVDFANDLIHSELFRPPYARITPAQARALSQRYKLVMWDVLSRDYSRSLSPRKCLKNVTKHLEPGAIVVFHDSEKSFRNMRYALPRTLDKIRKLGLKCKTIELMKKSYFLLLAVLLWGCSTFEEEVLPAPGDSPRQLSVSAVEEPGPDPGSLEIMQRAVDSVAAHSGQRSRSASVSGAQIEPTHRYVRFSPATKAQFDALFDQDEFTCYNFPLDEVSPVSADEGFRMSGPSDTPEQLYAVLRTTVVLPDTIASEVLKELYDPSVTERGVADPVWADRVWAEARALIDDGRHPGKIIPYIPSGEIKVWDNIAGDYIPIEGVMVTIMPPDNLLRVLTTRTDKDGKFRMSGSVQEPVNYALSWNTVYWTIKSSAVSSANLRGPSVQGAWNVKISGDDVISGPATVFRAAYRYWHKMPALGLTAPNLGRKVRITCHNSVGFTYYWNGKELSASGLFHPVVNSDADPDIEVACKRNASYVFGTVAHEIGHAAHYAFNPKFNGKTNALIKESWAQFTRYILTETEYKDLGLYGKLHKSRLFNPNQHLVAFQVPDYYNQQMWYLGLGAERDETVRLYTPMFVDLYDTFNQNKWYGYWSPGRTKDDLDRTPDDDICMLTIREIQEIAFGSKNKSEAIGWIRQYAARYGFTSEEIDRYWAVYSLIEDEDYDRYKMKNLIWILAAIMLAGCGDNEEGQDMGLHGDPPGYSLFIWSNESDHRITMTVTDRFEKKEILPGESLLQEEVGFVTPPSLEGYMIDGVSIVFDDGPYGGVFFRTDKVTAFNPCLECNYTVERSNIDGYIGFCRWTYTFTNADYDAAVARGPMKEQMKKLSYLLTLLLLVTLMTGCKAFHTLMDSKLKAAQGAPYELIVVCNQQLWESELGDTLRSVLLAPIPYLNEREPLFNVMQFPESGFKGTVVDYRNILKVLVDPSLAAASAGVQYDVTASPQVVVTLQGPTREALTQYVAEHRAELVQTFEGAERDRSIAFANKFNQTESGKLVREKFGVEMKIPKGYILAQQSDDFLWFRYEFPAASQGFMLYSYPYEGKQSLSEEALLAARNRFAARIPGPSDGSYMTTSKVFTPRYRFFRLEGRAWVEMRGFWDVEGDFMGGPFVSYTTVDTATDRVFTLDCYVYSPKLPKRNYMREVEHLLHLVKFPAATGSASATVTAGRREAAKSDAPASRDANPNPEAISSESMLQFLTYLFIAIYTATVIGIILVVILGNRNPLKTIPWVVVLIFAPVVGLVFYFFFGQDLRRKRIISRRTYKRLMVYALPAHVRRSDAPVPAACQSLSTLLTNTSQAVSFYGSRLTHYGDGASKMTALLEEIEKARDHIHILYYIFCDDETGARLQQALIRKAKEGVKVRVLYDDVGCNGVKKEFFQQMRDAGAEVHALLHVRFPMLTDRVNYRNHRKIVVIDGRVGFFGGMNIADRYVKGPGWGVWRDSHFKVEGKGVYGLQSAFLVDWSTVERVHLDTSKFFPEADNYTSSTMQFATSGPLGPWRTLLQGIMTAIAGARRSICIQTPYFLPTEGLNSLLQTAALGGIDVQLMLPERSDSRIIDKAVHSFIDDMLRAGVKVYFYTKGFLHAKMLIVDDLLTVVGSANMDFRSFEHNFEINAFVYGQDFNTAMRRVFDEDLRSCRRLIPSEWLRRPLPQRLSESFMRLFSPLLMAKEIIYLTAEGYKKLKDELDHMRSVERPAISAAIAEARDKGDLSENAEYDAAREAQGLLEMRIAKMEDTIANARIIDESKVDKSKVQILSRVTLLNHNTGKEVIYTIVAEHEANLREGKLAIGTPIAKALLGHKKGDRVDVTVPAGTIHFEILDINIMMEQQEMTREEAVKAITSYGNDAYTARGLEPGAKYWAVAVGIDADGHTTTKPTAEAFTAQTAPESTNTFEIATTAITQTGASITVTPSNSDVYFLDVLSADIQSQVPTGTDYQKYLIDRYFGWGMLDMYLHEGPFTYEAKELNPGWEYQIAVFGCEQGFPTTPIKTETFKTLEGGDPQTFDVQFECTLSSVVASKFSTVPSADDVVYIFDLISEEDYQAFGENIEEGMKKVLESKIKDYMGTTGLHAEAVSMLAATGPVEFERNLQTGDQLRMWAVAIDQKGVPVAPFIISETYTVEENTAALAEVSIDSYAWYDGAELAQLDPINFAGFEEYAVLLLKVSHNDKAAHWWTGCFMGDLSNPDEYSDRSIINNLVTYGIPEFKDAVDQLLAVYWDENTICGVAADAEGNYGPVIRQMVNLTKEGASPAGELIGGGLSNINLMDMRQAKFAHRMKKILIPFLILAVFAGACSDDKTDVPPPKLILINMSGQKLIRVFNAGALLLILLAAYAGKSLHTHPDEYYRYLTENDANTTSPALVDDCAICHFHFFSYIHSTDWVLDSEFRLLETFFRPECYDPAIVAISGSQLRAPPAIGMINQAHYGQEDQFFHIIIIKRLYLQCPIIRRLRNRVRGRLFAAGGCVCNEVLLNLLLGMDSGRYAPKWIHNIILCFKMMKKLILLAVMCLVYHTLFADETTPKPQSDAHLYGHVIDSETGEHLPYVTVTIPGTTIGTATDASGHYFLKNLPTGTITVEARMMGYDPVRHEVSLRKGQSLELNFEITENGITMDDVVVSASRSETTRRKAPALVNVLDRKIFDNTNSACLAQGLSFQPGVRVEDDCQNCGFMQVRINGLDGHYSQILVDSHPVFSALSGVYGLEQIPASMIDRVEVMRGGGSALFGSSAIGGTINIITKDPDRNSAEVGHTITAIGNSSSYDNVTSANASLVTDSRKAGLYVYGQNRHRSGYDHDGDGFTEIPQLQSQSLGLRSFFKTSAYSRITLQYNTVMEYRRGGDRLDLPPHEAMIAEQTDHNINGGSLSFDLSSADFSNRVNVYASFQHIARKSYYGSKQDPDAYGRTHDLTVATGAQYIHSFDRLWFLPADLTLGVEYNYNDLDDESIGYDYRTKQKVHIIGAYLQNEWKNEHWSLLIGGRLDKHSLVDHVIFSPRANLRYNPGEGASLRLSYSSGFRAPQAFDEDMHIAIVGGERVRIRLADDLREERSHSLSLSADLYHRFGKVQTNLLVEGFYTTLDHVFALRPLPDPDTDGSTIKERYNGSGARVMGINIEGKAAFTRWFDLQAGITLQQSRYKEPEQWSEDPEVAPTRKMFRTPNTYGYLTAELTPVRNLQAAITGTYTGKMLVQHMAGSGTPVDRAVTTPRFFDLNLKVSYDVILYKEIALQLHAGIQNIFNAYQKDFDRGANRDSGYIYGPSLPRSWFVGAKISFMIFSGYKPNGAAWRLRSLMAAERFSNHYCTDLHEPQNNFTVFLVFNISIHPSKFVFAAIFVLFSKQGWLEMFNSRSSISISTFLSSLIGSIMRGRRSVRCGQTCEYRKARLILTHDPGEELFLGALHPAAALFREHIDIPELIAEHATYRKVLEEAGARVLTVRQILLDGTGADGKPADRTKLENLRRFAAGFLTFDTQNLSPETAEQQKEYRQSILAKTSPRDLVRIILRQPIIRLSETQINTGLKAEYSENPVMNLFYTRDQLITTAKGVVIGRMNSPQREKGCDILQFCLEKIGMKPLHRIDGEGAHLEGGDFYPFGDTAFIGCGMRTTQPAIDQLMEHDLLGCNRLVVVKDRLFSQAEMHLDTYFNIIDRNLVTLTARRMTTDPDSPDLLLADIYLRGANGVYTKTEEDVGFVELLRNRIGAAIIPISEEDADRLAGNFLTVGPRRIIGVAGQSEALRTELKHRGVKVTWVGLDNLCKGYGAAHCMTQVLRRRMSKVTVVGAGAVGATCANVMACREVASEVVLIDIKEGLSEGKMLDMYQCSTLMDFDTKLVGVTNDYKQTANSDVVVITSGIPRKPGMTREELIGTNANIMKGVIENVVKYSPRAIIIVVANPMDTLTYLALKASGLPKNRIIGMGGALDSARFKCYLAKATGANINNVDGMVIGGHGDTTMIPLLSKASVNGVPVTQFASKKKLEEAVASTMVGGATLTKLIGTSAWYAPGAAASMMVESILHDQKKIVPCCCYLEGEYGQNDICIGVPAVIGRKGIEKIVKLDLTKEEAAKFEASAAAVRKTNQVLHEIKALMNVPANLKYSNDHEWCRVEGGEAFIGITDFAQSQLGDIVFVDVPTVGETLSAGDVFGSIEAVKTVSDAFIPVGAEVLEFNPAVDADPSIVNRDPYGEGWLVKVKLTDPKECESLLTDAQYKELIGMHRTRYHFLEETTSTNDEARNPRYGHGDAICAERQTAGRGQRGHTWSSEEGRNLMFSLVWEPRFLPVSEQFLLSEAVALALTDLFGGYGIDARIKWTNDIYAGDRKLVGILIEHNLTGDRLSRTIVGIGVNVNQTRFDPSLPNPSSMCLETGCEYDRQEVLHRLGDCLAARYEQLEKGDREALQADYRRRMYRLGERHRYRYPDGRTVEAVLRGVRPSGELLLELPDGRTEGYLFREIEFVIEGKRTARTDGTGCVLKKMDNQLRQIIEEAWNDRALLAESRVREAVRAVIEELDKGRLRTAEPIDPSRSQWQVNEWVKKAILLYFPMQEMRTMRAGELEWHDKMDLKHGYEELGVRVVPHAVARYGAYISPGAILMPSYVNIGAWVGAGTMVDTWATVGSCAQVGERVHLSGGVGVGGVLEPVQAAPVIIEDDCFIGSRAIVVEGAHICRESVLGAGVVITGSTHIIDVTEAEPKQYKGYVPAGSVVIPGSYPKRFPAGEYGVPCALIIGRRKESTDKKTSLTAALRDFGVSVMPATFSYILRIYGMFGQSLRTNLHDCAGLFVYLSFETLQILKYVKTRMLKHVKITLAVFCAAAALTACKSSMKIKHLPYPDAERTEVVDNYFGTEVADPYRWLEDDRSEQTAAWVAAENAVTQNYLDQIPFREAMRARLTELWAYPWEGAPAKFGDYYYFYRNDGRQNQAVLYRQASLDAEPEVFLDPNTLSEDGTVALSGISFSEDGRYLAYAASASGSDWSDIHVIRTADKQPTGDIVKWVKLSNAVWTPDEKGFYYSTFDVPEAGVYSSQNQYQKVYYHTLGKPQSSDRLIHMDTQHPLRYFASSVSKDGKWLFITASEGTSGSEILYRKSSDKKFKVLLPGFANDHEIIRAENDKLYVRTNLDAPNYRVIRIDLNNPSVIEEIIPENPKNMLEIVSKPGDYMMASYLEDAQSQVYQYDWNGKLIRKVELPAIGSAGGFSGKKGETEAFYSLTNFTTPSTVYRYDLATGESTLYKRPEVKFSPEDYTTEQVFYTSKDGTKVPMFIVYRNGLKLDGNNPCYLYAYGGFQVSLAPWFNPAAIMFMEQGGVYCVANLRGGLEYGEEWHRGGMLDKKQNVFDDFIAAAEYLIANKYTSSKKLAIAGGSNGGLLVGACEVQRPDLFGVCLPAVGVMDMLRYHKFTIGWGWVVEYGSSDDEEQFGYLYKYSPLHNIKKGTKYPATLITTADHDDRVVPAHSFKFAAEMQYAQGGDAPILIRIDTKAGHGAGKPVSKRIEEATDVFSFLFENTDTPYKTVETKMKVYKFGGASVRNADGVQNLLKIIGDERDLFIIVSAMGKTTNALEKVFEGLQKGDKAFSMEHITALRQYHAEIVNELYGAPTRLEKIERLFGELEQVATETVYRPEDAELWYDTVVAFGELISTTIISEYLSERGIDNCWLDMRRCFRTEQRHKDASVDIAASRTLLRNAMKQSKACIFIGQGFIGGAPDGTTTTLGREGSDYSAAVAANILDAESMSVWKDVDGILNADPKVFPDAVQIAELNYLDTIELAYSGAQIIHPKTIKPLQNKNIPLYVRPFGDKRKPGTVIRRMSAPIEVPILILKKDQVLLTIRSRDFSFVLEEKFAAIFSLLERYRIKVNLVHNSAVNLSLCVDNSWHIDEAIQALRNEEFDVMKVENMELLTIRGYNGDLMERYASGPEVFLLQRTQSTARIVRKNRMKKLIILLISLFFIASCAVVKSSRIVGKCYLGYPYRQIMVFICMLSFMPIVRFYIGQLAVMIMILSSPNFNVETRPIDLYIFAEEEITDWRFPDEYYKFTDMEGNRDAYIIKGDTLYPVLKNGKSLIEYLYAIPKPGPELGLYNRGIYFGPKKDKMDGIIGTMTANEAQIEGTGEKVNLFDYHVKADTILFQYTTPDGRNEMVKFPLAGFCENYLMQFVKMSVLCKDNFDGFCNVCHIRGKQVDKCFGKYFVFGFSYKQDYSLCLAPFNRLLDYLFILSCVGLSFSFRLFVSVHFSMKRLIYKTLLQSLSLSYFVYFANNLIFILQKTLHRFSILKDKMKKLFLIVAAMFAVVSFSACSDDDDNKDASIVGTWQITYYEGWATFSDGTRDDWSDAYPLTSEGNYYWTYTFNENGTCVQTDYSDNKNDDSSPMHFTYSVNGNTLTMTESTGEFQNVFQIKKLSQSQLVLFRSGEDAHEKFEETETYKRIKMARVKNHTKVKEPIRLRMKPLSDGSKSLYLDIYRDGKRTYEYLKMYIIPETDNNARRQNQATMDAANAIKSKRIIELTSNEAGIVFRKDKTYLLDWMKVYMEAQESAGKKDGNQIKIAMRILKDYAGEMVTLDQIDGDFCRGYITYLLTEYHPKGKDISNYTLHNYYRALNGALNSAVRKKKMKANPFNELEKSEKIRKPESMRSYMTIEEVQALIDTPMPHEEYEIVKCAYLFSCFCGLRISDIIKLKWKDVFVDRGQYRLAVSMKKTKEPIYLPLSPEALKWMPERGGKSSEDNVFDLPSANTIRMQLKPWAKAAGISKRFSYHTSRHTFATMMLTLGADLYTVSKLLGHADVKMTQVYAKIINKKKDEAVNLVNGLFHMWFMSNLQTSIYGIAPVVNATEVNAFITYYKLKKVNRHEKTMANELFALLTEAKTVYLHDVVSGGKQYHRYVDDFVNGHRYIDCDHAACRNCHEMNIHIVKGLLTEYARFVQICFATPNFTFDECMKLKRMYDTSESLPPLGPPHIDRPADLSLSFGCDFTPEQMESIVACANTYHLFCVSVRIEDMEALFACKKGFSIRVNNIRRVVILFDALLENSLIQSRWQNVLGKGAFLQSKDGTRSVSVSTLSSALSSIKNNMTSVAYGIRKTIDRLKEMPNRMTFMERMSGRLAAIESVLKKLEPVESLLERITLLENTIFTTKRVFTFQEACMYIGVSESMLYKLTSSKEIPHYKPRGKMVYFAKEELDEWLLQNYEPTVNEAVRMATEAAATEPFLNKRRNGKRKKDMDEHRLSDILLASQIKATDIYETPPQIIWIDNSTIATLGNFSASTGKAKSKKTFNVSALVAASLAGKQVLNYRAHLPEGKQRILYVDTEQSRFHCRSVLERILRLAGLPTTTDPENLDFFCLREYSPSVRVEVIDYALRQNKGYGLVIIDGIRDLMLDINSTGESVEVINRMMEWSSRYDLHIHCVLHLNKGDNNVRGHIGTEMSNKAETVLVISKSNENPGISEVHALHIREKEFKPFAFTINETGLPVIAEGHSFGEPPKPKARTGFTELSIEQHREALSAAFGEKPIRGFDNLLQSLMVSYEAIGFKRGRSVMIKLMQYLIDNLKLIIKRDKLFYYDMTPTEAMLFDEEMTIAEAKQVRIVDFLARLGHHTQHIKSGQYWYLSPLRNERTPSFKVNDRINEWYDFDAPIANEYQTRAMSTRLPSCENATYMLFGLMAEVGEIADKIAKWRRKGVCRLDMDHLVFNTDDLQEVEGYKSELMKEVGDCAWFIAGIADCFGFTLEEVMQQNLDKLASRIAGIADCFGFTLEEVMQQNLDKLASRRERGVIDGNGDNRMSLHLQLGRLPAMLAIKGNPDVSWAPIYGWLSMEQKSKLVWDTMKPIEERANAAWSDYEYREGELYSTCFIDGFSAGAQSERDELTRWRDPKVELPNDNRDVLVKTTLCREYCIAFYKANGGRNHHWHENNGSLDDDMVIGWRPILEKEMDITKMTAAQRAELKAQLEAEERAEKQKREESIAAYKSSVDEFCRNKFSRLQALSEEMRRLKEEVFGDAETLIALKDELFRTKSDRHSNQFTTSDGKITVALGYRTNDGWDDTVNVGVDKVKTFIKSLAKDEDSAALTEMVMNLLAKDRKGNLKASRVLQLREIARKSGYPQLIEATDIIQNAYRPVDTCQFISVSYKDDKGVKQTLPLSLAAMEMDLYFVILGILFFIFGLLQIILFFKLWAMTNNVKKIAQGNDSPHVDWQLRACVLTGDMDRAEKLIIEDFVEKVRLHVVQHGPSESIGPIKNACRARFKAIGKQMPEAIEKLQNGANIIQLIPMYRVRFILQRPGYRKCYLEGLYRPRGNLSVNAMRKACQEELRQYLEAQDPEYRKFDIKLTYFNRLRIDFLLNVGIVMWGLFDNIKTLPRIENRQRFCFFQCKISYLCNMGNTSDNQLILFHCPTIEKAGNRRRTRSLPRSGDGNITSRADRIAKRNRLLTARYYYWTELERRRFDDVLKILADNEFFVEDRTISNALVAEDEFYNKLIRQRTTKRQLRQMFPGFDWGMEKELFIALCDQLKNKVPELRWIDSDQGQLNVSERPPVAFPCCLVEMSYPQCTTHMAGKQRVRVRFQLQVAFNVWGTANASAPQESREKALQQYDTLQNIHKALQWWSFGRKINPTSRVSVLTENRSNGLKIFRMIYESEFMDMKIEIDKLLEKRMEEILQGTAEIVAETSVGYFQDTFRHKAFDGNPWAPPRVPKQSGSLLVQSGALLNSIRPVVVTPGRIVIAAGNEKVDYARVHNEGFKGAVAVPAHIRHTRRGDQSVRQYTRRVNIPRRQFIGDARELETELQKRIETHVESVLNNMSLRPDVLLFTLGTRPAGIRNALDSQCHTAASGMAQIGYKTSSRKSSGTKASKPIVVQQIVVQAPQRRVYDIGDWRSALRSADNGRPKYLYDLFEDIMIDGVLADAINKRIEAVLNAEVVFMNARGQEEPAIAAMIDTTAWETLIREIMHRLFYGRAGVELFFNSGFHVEPIKPKYIDLDNCQILLNDTGDRSVPYDQDPNLLVVGRPGDYGLLLKAAPYAIWKRGGFGDYAQWIELFGMPQRIGKYNTFDPQSRELLKQALEEAGSAPYLVIPKEADIETKEVNRGSGSSFNEFRQATNEEMLITILGQTLTTIQGERGARSLGEVHLQVEDSKHTSDLRFVQRTLNERLLPVLETCGLPVKGGRFVYPKAADPLSVDEIVKLSTIIDIPAAFIHDKYSIPMPDKGEVIAGEKSNMVLGSHLETDTDVEEKVRNADNRNIWRRLWDFFIKAPQGGAFDGTALMRMQDSDTLEERLMGRVAASQPAFDTELFRFLSEDLLKAVQPEADSIGNADIGVVYGVRDDALQTAMEINLFQFSAAKTLAELQELNRLFRESSNFADFEREARKICTAFNRDWQRTEYDTALLTAEAASTYRRLMGKTKLFPYWEYRTVGDDRVRPSHRQLEGIVLPYNDARWKKIFPPNDWRCRCRVVPRMAHEVKKETVEASQQRVDEFFGTATWKKAAAQGWGVNRALTGEVFTQNQFYIRRFQNKASKLLGRLYYNDWGLDSFAKRLAAATEPMPEYSGSAAEWYEAHKTLHDYKGREVVMDEKVFRTHTTGSYEKVRVPLLACVEEVLKNPDEVWLNDYHRPFRNMNFIKFYDGKVIDVICEVDENLEYRITTWFEIVQTPNLKQKTRSSRHIDPRWRYRRGLLIKKSMAFLTPEELQTHLYKENIETIAREDDAIVAAAIDAAIEEASGYLGAYDRKKIFGTEGDERNALLLIFVKDIAVWHFINLCNAGTDLQLRQDRYERAVAWLKSVQRSEIKPNLPVMEDADGDGKPDPAAGEYIFGSNPKRSQHFMGKVDDMRAWNEWREYHRALKRDKAVDKLSPVERMRRLEKLEKDPVSWMLFFFAEYTRHPFTSFQKKAIRRITSNPEWYEVLSWSRELAKSTIVFMCIMYLVLTKRKRNVLLVSNSHENATRLLDPYKKSFEQNSLLKAYYGDLREAGNWTADEFSLTSGAAFRALGAMESPRGTRKDAFRPDTILPDDFDTDADCRNPDIVKKKWQWFEEALIPTRSVSGDLLVVFCGNVIARDCCVTRAGAKADHWDIVNIRDAEGRSTWPEKNTEERIRRIEQTISTKAFQQEYMNNPLSEGEVIKEVIWGKCPPMQRLQFAVAYADPSPSNARNKASSFKADFLLGYCDGTFYVYTGFLDHVTNDEFVDWFYNLRDYASERVQVYYFIENNSLQDPFYEQVFLPMFAARARERGFIGITPDCRCKPPKFERIEGNLEPLIRQGRLVLNIDERENPHMKRLEEQFLLLNRQMKSPADGPDCIEGGVWIINQKISTLNEGSYTIGQRVRASKRFMTQELDNKQKKEWAKLLFLTTDLTQAEIAVKIGVSRITIVRWAKEWEGLKLNFLQTREARIKSTLMQLNELDESIAAREQGARYPTVKEADIRRKLTADLEALEQEASVRDIVNVSRDILDYVRAIDLEKAKMLSDYFDSYIQERLKWVKMKRFTFVLHDETVNTYGFRMLTSGANLEEFRKNPVILLNHKDWELPIGRWENIRIEGTQILADALFDEKDDEAVKIADKVEGGFLRMASMGAWPPEEVSDAAELKLPGQTLPTVTRWTAREASIVTIGANHNALVLFDRQTGKPLDLTDASTVIRLMDRLNHSKIDSNMNKTLKEVLKLQDSAQDAEVIGAVNRLIENNDRLTRENQELRDAAARAESEHKEIRKSEAIRLVDAAIADGRINTAGKEAYLKLFDTDFESAKATLEAIPHRKSVTALIREGERRQSVELSDLVNKSWEELDKAGRLVELRDKAPELFREKFKAAFGTEPNMMAIQKEIWEKSIVEGLFAPNSFLSKAFNADEYVEAGKIVHIPQAGAASKVEKNRTSLPATVKQRTDTDKTFELAAFTTDPVLIPDADKVELSYNKRESVLRQDKLALHEAVAKDFLFAWSPASDRVIETTGAPVDAYTPSATGRRKGLCRADILTLMTKFNSENIPQEGRYLLLDAQMYAQLLSDLTANENSAFLASADAQNGIIGKLFSFNVMMRSQATLYTADKAPKRWGESGAATDLAAALAWHDQSVCRALGEVKAFEQEKAPDYYGDVYSFLVRAGGSIMRGDNAGVMALVGTATEMKPTDFKRTYYPTIERVCAETGLNPLFVAAQAALESGWGDHAIGNNLFGITAGDKWTGKRRTERTFEYFSDDRQSGRFEKVYSITRTSDGRYRYEVDRKFRDYDTPEEGIRDHAKVLSAKRYAVAWAYRNDITRFAYEIAKAGYCTAEPAAYADLISKIARMIERAMDSIWMQILAFALPGGFLGSVFTWIFSRRKQNNDFLKELQSSINLLSGENKKILEENIQLRRENIDLKANQEEMLVRIDRLTKEVERLRKTIGKRNSYEDKTLFAAIHPAAGKLHCDEEAPLDRDAEQYGYRVAHATRRTKRRRANRTSGNELSIGGDLCAAGAADGGDSASDSSGDGDGGEPPMTVTEESLRNLPEGAAYVARDGRLTLEARRDGDTIRISARSDSLARRVEYYKATSARQDRYADSLKESLAETREAYDRLLEVSRHQSSETAIQQTRSPAYRGRWMLFGIVIGCLGGWWAHKTNLFAKLFKTIMSKRSVIQTNDGYLMLLDAVYFNGRRMGNISEEGLDWGGEDAQTVELWAAQIRTSPVLDIETRAATNEITGKMIEMVPQNCVDLMGGKVAGEEWQMPASSMRVEGDMRILTGTGKTVKLKRVSLRASKIRGGLGGENVLGIEFGLKVLAPLDGSSPGSILPTEPFIEADPTSLTFEQAGGSLPVDIEASGPFSVGAVPEGFSVEVINGRVTVIAEANSTESPRSGQLEFILESDPETKATVSLSQPNAMKRNVELEAAEALLDVGILLPLLRFRLPGGRERVLRVTMRRPCLGGQMRIVRHYLKLGITAREWDAFSEDEERAFFDRHAKRLSLILALTICRGYLSGLLLAPVVAWLIRWKVPSEYRIEAQRWFRRMRGTRDFTSIIESAERIDPFRYEASRPKRAGKGSMHYILWKVNFQTLAMMLADAPHYRSVPAECTEAGSATGKPDTAQLFQSKLNLQMKPVEIEFLVKNNTRQGLSGVSGGIDGVEKDAMDARKQIEALEAEVARLSKTMSTTPKMDQSDNIRQIETLQARIKELEEELGRVSKSAKAVSETAKNTTIVPSDATKAKSTFNGLNMSIQQLARELPVLSMGPQMFFMAISNNLPIFTDELARARKEYEAMIASGQKGVPVWRQVLSSLLSWQTALAVGITLTVAYGKEIGNWVTNLFRGKKALDTARMATERFQNTMLEGARNAQQEVVKLNLLYRAATDNARATDDRRDAVRKLKEEFSGYFKNLSDEQIMLGQANDTYKELIKNIYKYAKAQAAFKSLVDIEQQELFFNNIPDIEQFRKDYDKYLEAQKDVADKRKIYDAATWTQRGNASKMYKDLSWAETILSDAEESVSYWQERIFEEIRKNKGGEEIIDEIEEKFDGNLGAFLQFLAEQRTKLAAVAEQAQLLENPSGTPSATGSEPASTDQLTEQYKAAVRRQQQSLDDQRVELIENEFDREREAIRLNYEKNRQEYERQEQQTLALIRKLRESGADIDSNAEKTFMAGTAAAIAQAAEIRDRELADVDKKEEASYTKLLEKYETYQQGRLRIARKYDQDIAALASNPEAQRLAREAKQKALDDFTEQFASQFPEFEAWADRVVAASVKKLESLVIEAQEELENLQSETPDDGNAIAVARAKLRKAEQQLAKKQNQTEQETTDTTSWTELHRVLTDVIGTFNEVGDAVGGAGGTIIATAGDIAGSTLQIINAVQAYRKAQAASNTLGMASGILGGISAGIGALTTIVNLFKGGETSMERNLRLAREFNEELRIMKERSRIDSDEFDNIFGDRVYDRYKQNIDVVRTSLEELEKVRERILSRGEEKYQLPGEWRGGAGTGLSGLFRYEKTWENIADSIANMQVQTRHSTWFRSAKYQSLGSLLPELFTDGEVDMDALRQFVEEGGETFQHLARENQEMLREMVDDWETYEEALTAVRDYLQDIFGDLGSTLTDALVDAFENGTDAANTFVDSVGQALRLLGKRMASSIVFGKLFEDTQKRIEKVMQSDLSDEERFAQWSETMKSLVSGVMDQQDDFNRLWEEFRRIAKENGFSIDEEAGTSQQNGKAGATQTVTQDSFSRVEGLVTSVQIHSANIDENTEGIVPVLKGSLEAMNAIRENTEPIPQIYELLQTIKRDGLKAIMAEILEGLLLINQTDVYARFGAFLAETAEDRHDNYDSLLAPPALKQQAEVSIREEDGVRMPDILTQTYEARDITLRFAIVASNDVSFFMRYASFVKFLKEGDDGWLALHLTDVGLKFRVYMTGFSDYSQLAPFGKGEVAATFSVKFREPKPTFELAASIMELKIYSKEGNLKLTASPDSNSAATCGIQEESVLSLSFTAFECVTLEVYDYADFLGRRYWILERYQPKMNCDSEWSYSVQLSGVEGLTTQVLMVNPDDDDNPILTLTAPAREHAALIIANMNRKMGTTEWKVGEVVVSEYIDIEYTGKYASDALSELSSAAGTEWWFDGMTLNISRCEFGEPVPLSYGDGLIGGIERSMADGVKFFTRLFPVGSSRNIDPDRYGHARLQLPDGAKYVEQDTHLGIIEYFEQEAFDAIYPRRIGTVGAVRSEERTSDDGSPFTVWYFTDPDIPFDPNQYEIGGLVKRVTFQTGELRGREFEVNYDSEKKEFEIITQWPYDNDMQLPSEPLVPAPGNEYVLWNISMPDSYYPAAEQEFKTAVDTFMADSRKDISVFQASTDFTVVDKRNLDLKPGQRIRLGSDKFFPDTGYRDIRIVAISRSVVQPGSMTLKMSDVLSTGRISRIENQISEVTQITRQVSSEFPDIIKSWEETPASDTTLYSSRKSEREFLNKRRGGTVEGITRFLKRQQLDEGFRTSDFASGITGFGAQIDGRGAGELESLFIRRFLEVPELRKNRVGISVGDDWSAPGAGVIESVDKDQKLVTLKLEEGEIGAVAVEDICMGIFHDFDPSNNATADSDDGRGNFSFAGFATVYFRITEVLGDRNEQFRYELRPLSATFTRQIDPMESMTFVAYGSFTNPARQSSRYSTRTYQRYLRNVSDWEFTAENIAAQFGDLTNLSVFGIQMSGYSAYLDNIYLQGMISSLDKKALLDTRSKLFRLVGDNGVGVAFTPEAGWKQGKLYDPATGQFQKEFDIEASGNKIILTTNNINSVSQVLGSSKVPSSQTTGNVAVITSQTKPFASDSRNSSQFKCGAEVQMSAQVKGTIRSGGSVKIEIINQTADTTDTIFRQSSAYDDTVSIQINKNISYRFTTPGNYYIKVTVEASSSGGLGNAASAAVEAITFSFVTDIRKNLIAPNGVAVVKGSSNYAMKTLNERATEILKALLAVRAKKLKIKNASQTIHVKLTDCIGKYNLISLTQHIEINGVLFRDPEVIFAFNTIKRQFIPYHYINDFFEIEKCCATPTVEGLIPRNEIDQHNLACFVNRWLLQLTSKLEIQWMRNEMAKVRNLSDIQQEIAFTEFDFYQRYEESFKTSELGRIKSLLPLREMAISFGLVEEKPKSLRVKRGRKSFFTPEGKVALAFLKMYTGLSAPKLMDALNGNIHYQIFCGIRISPENQLTNYKLIDSILVELSKKLKIQEQQKVLADAWKPYMKNLDTVYTDASCYESLMRFPTDVKLLWECVDRAYKMMCGISSQLGEHRMRTKYNDIDKANLAYRKQRKHTHKQTRKMIMRLLALLGKILGEIRRQMRVHPDEELLNYKQLDMLETVTRVYRQQKNHFKSGDSRESIPNRIVSLSKPYIRPIVRGKETKIVEFGAKCNNILIDGISFIEKLSFNAFNEGTRLKHCVSLSKKLTGVDVKKIGGDQGYSGNDNRTFCKENGIETSFTQKGRTGKNEVKNATKRELARVRATAMEGSFGTQKEHYGLRKIAARIKSTEIMLIFFGIHTANVVNLARRESVQVALAAMEHDFTGVVAPDVTENEKIGPKNRADDIKNDEYDRKNKGKSAG

SEQ ID NO: 4 - protein, 979683 aa, Barnesiella intestinihominis (residues 1-326,561 of 979,683)
  misc_feature (212899)..(212913): Xaa can be any naturally occurring amino acid
  misc_feature (651560)..(651608): Xaa can be any naturally occurring amino acid
  misc_feature (731684)..(731687): Xaa can be any naturally occurring amino acid
  misc_feature (735128)..(735131): Xaa can be any naturally occurring amino acid
  misc_feature (886762)..(886765): Xaa can be any naturally occurring amino acid
MIVGIPKEIKNNENRVGMTPAGVNELVKHGHTVYVQKGAGENSGFPDSSYERVGAKILATIEDVYAISEMIVKVKEPIAPEYPLIRKGQLLFTYFHFASDRKLTEAMMSSGATCLAYETVELKDHSLPLLIPMSEVAGRMATQEGARFLERPQGGKGKLMGGVPGVKPAKVLVIGAGVVGYSAARIAAGMGADVTITDLSLSRLRHIDEIKPANIKTLYSSEFNIRAELPATDLVVGAVLIPGAKAPHLITRDMLSTMEKGSVLVDVAIDQGGCFETSRPTTHSEPVYEVDGIIHYCVANIPGAVSATSTLALTNATLPYVVQLANKGWQKACSEDEALYKGLNIVDGKIIYPAVAEAFGLSCETIMIAGMSSCGKDDGSSSVPQRPSGGNQADSIAIAGIQWQEREIQTGIISKTAQVPLLFDYPQTISMLEIDLNKADVSFLVSYEAGSLKKTTSDRALAANALAAVNGTYFNTSTGISRHFLKCNGTVMAATQTNEFSTRATGAFCATGDVVEIKKWSSMEEAAQGGNYQQVVVSGPLMLDDGRDVAMWSNTFTTDTHPRTCVATTDDNKVLLIVFDGRLDGAKGVNLYDLRTFARQMGATDALNLDGGGSSTLYIQGYGVINYPCDNGIYDHEGERAVPSVLLVKKNMIRLNVFIQVEKSCRDKVLDIARKLTECSLKEPGCVAYDIFESSTRPDVLMICETWKDADALSIHEQTAHFVSYVGKMKELSEMKLEKFNFMEIKGRIIHVLPLQEGVSKAGNPWKKQEYVLETEEQYPRKVCFNLFGDKVDQYPAAIGEDVVVSFDLESREFNGRWYTDVRAWKIEKSASVAQGVPDMPPMPNDITPFPPAPAAPDLAPSPTDDLPFMFLLEVSLLLRYKMKFGQNGVKKTCFHLALPLTFCYICCRIITQLVNMKEKQLLKTIVEGIQEKKGKKITTVDLSKIESAATSHFIICEGQSTTQVMAIADSIREYVLQNTGIKPFGYDGYQNGQWIVIDYGSILAHIFLPEYRNYYKLEQLWNDAKLAEIPDVEMSPLGPKKKGIRFNLYWMYSLIALVLIGLYYMNDNTMSKEVNWTEFEKIAKEGGITRLTVFAKKDYAEAQLNDSTAKAVFKTDKINGKPVIYTNIPSGDSFAKTLDTWKKEDGFNAEVYYENSSDLTNILWSVGPFILLIVFWIYLARRMTNQGGGGSGGVFNVGKAKAQLFDKDGAVKVTFNDVAGLSEAKQEVEEIVEFLKNPNRYTDLGGKIPKGALLVGPPGTGKTLLAKAVAGEANVPFFSLSGSDFVEMFVGVGASRVRDLFRQAKEKAPCIVFIDEIDAVGRARGKNPNMGSNDERENTLNQLLTEMDGFGSNSGVIILAATNRADILDKALLRAGRFDRQIYVELPELNDRKEIFKVHLRNVKIDDSVDVDLLARQTPGFSGADIANVCNEAALIAARKNKKSVQRQDFMDAVDRIVGGLEKRSKITTQEEKRSIAIHEAGHASISWLLRYANPLIKVTIVPRGRALGAAWYLPEERQITTREQMLDEMCATLGGRAAEEVFLGRISTGASNDLERVTKQAYAMVVYFGMSEKLPNLSYYDSTGQEYGFTKPYSEDTAKLIDEEVSKIVSEQYERAKKILKENADKHAQLAEVLISREVIFSEDVEHIFGKRPWVSRSEEILQDEESAKQEGEKAEKETQEKDTSTGNDNTHERENKTEEKPEKDSENTMKNLLTRTLTGILFIVIITTAVLSGAYTFLFIFGIISLLGYIEFINLTQFGRKFDKILLMLDMAGACALFLAVFSFSGQLPYNFQKASILTYVIYLIARPVTQLYSTPEKSPITSWAYSILGQIYVVLPLALLGVWGYKSDYQLFMNTEYLLMALFVFVWTNDTGAYIVGCTLGKHRLFERISPKKSWEGFFGGLAFCIILASLANYIIPGMLSTAQWIGMGILTSIFSTWGDLCESLLKRTAGVKDSGKILPGHGGILDRFDSELIASPVIFIYLTFVLMNDQRYNLRGVSASKEDVHNAIKNIDKGIFPKAFCKIIPDILGGDPEYCNIMHADGAGTKSSLAYMYWKETGDLGVWRGIAQDALIMNIDDLLCVGATDNILVSSTIGRNKLLVPGEVISAIINGTEELLAELRDLGVNAYSTGGETADVGDLVRTIIVDSTVTCRMKRKDVISNGNIRPGDVIVGLSSYGQASYEKSYNGGMGSNGLTSARHDVFGKYLATKYPESYDNAVPDELVYSGTLKLTDKIAELGIDAGKLVLSPTRTYAPVIKKLLDEMRSQIHGMVHCSGGAQTKIMHFVEKMRVVKNNLFPVPPLFNIIQEQSGTDWHEMYKVFNMGHRMEIYVDSLNAQKVIEISHSFGIDAQIVGYTEASDRNELIIESDKGRFEYRMLIIGIAGGTGSGKTTVVRKIIESLPAGQTAVIPQDSYYWDSSHIPVEERQNINFDEPAAIDFDLLVKHLKELKAGHSIEQPIYSFLTCTRSNETITVEPRDIVIVEGILILCNEELRNMMDMKVFVDADADDRLIRVINRDIIERGRTVEMVIERYERVLKPMHLQHIEPTKRYADIIIPQGGHNSVAIEIMTNFISHKLKGMRRAISYWIYILFVLIFVSACGGNKQHSSENVLNDFDSICQRGELRVLTLYSSTSYFIYRGEEMGYEYERIKQFADHYNLKTKVIVADNIKRLTEMLQKGEGDIIAYEMPIIGDAKNEWLYCGAENITHQVLIQLRKPKNEMVNDVVDLIGKDIYVEAGSKYEDRIKNLNDELGGGIHIHHIDKDTVVTEELIEMVSTGEIPYTLADNNLAQLNRTYYNNIDIHLKVSFPQRASWAVNKHSKSLAHAINQWVKENHKSDSYRSISRRYFELSKTLPASAVLSIPKGQISIYDPLLKKYAKQIDWDWRILAAQAYNESHFDTLAVSWAGARGLMQLMPRTAQAFGVSMNEITNPEKNIGAAVKSIQSLNKSLADIEDKNERIKFILAAYNGGLGHILDAMALAKKYGKNPHVWDKNVSEFILLKSNPEYFNDEVCKFGYFKGRQTVAYVHEVLRYYKIYQEKIPLMKKNKLNMVVAIALCVSLGLSSCIGSFKLTNKVLGWNEGVGNKFVNELVFIAFHIIPVYELTVVADILVLNSIEFWSGENLVSQSTKEVKGENGDTYLVTTDENGYTITNQKDNTTIGFVFDSNDNSWSVSANGETTKFMTFVDDNHVKMPGVDGNDMIIELSQTGVMAYQEAAQHFNFAMKMDIKELKPTSIWHYFDAITGVPRPSKKEERIREFLLNFAKEQNLEVKVDKTGNVVITKEATPGCEGAPTVILQAHMDMVCEKNGDVKHDFERDPIETYIDGEWVKARGTTLGADNGIGMAAAMAVLADEELKHGRIQALFTVDEETGLTGAFGLESGMIDGKYLLNLDSEDEAEIFIGCAGGIDTTSTFTYKQEALPAGKFYLRVEVKNLLGGHSGGDIHLGRGNANKLLARFLWLCMQRHEVHLCAIDGGNLRNAIPREAMAVIAVNPEEKEAVRAELNHYAADVAAELSGVDPHVTVDMVTADTPEFMIEDKVARALISALYAAPHGVIAMSHDIEGLVETSTNLASVKMTEPGKIVVATSQRSSVESEKYDIAYQVECLFRLAGAEPSHGDGYPGWKPNMHSRIKDIAVEAYQELYQQTPAIKAIHAGLECGLFLTKYPQLDMISFGPTLRGVHSPDEMMHIPAVEKFWNHLVLILEKVALEMLLHYLCFAKIGKENVISVEEWKYFADRIGKRVNFNINFFEYRKFSSDQIATKIMWNILLFTVGFVAVAVVLLGIRVFFVKGGRFPSSHISDNRHLRNKGIVCAVSTDALERKKRSGKRNINFMKTFTLAIRITTVVALSLLMVQCGNKQAAPNQSVSDDTTISSYGDKLPIAYINVDSLLSKYNYAKDLNEKMINKQENARASINEKARQLKKEQDDFQRKYQNNAFLSPERAQQEYQRLEKKAADLQEYAQRLENENMLEQQKMLMQMNDSINLFIKEYNKEKKYEAIFNNASTLYINPQYDITNEVVELLNKRYTSAKKMKNIFHLIITAGLVSILLVCCQSQEGKKQTESLYGKQIVAIGNSITAPKDSWAWITAQHFDMELTNLAVSGAQWTDYQGTTVDTNPKPVYDGVHTNNVISNQVYRFLQLIVPEGEIISEAEREKFHTSTPAPLTGLKTKNSTFDPTIVIISCGTNDSSNGKPIGDPSELDKPYQEADRKTLYGAINWAVSIIRKYSPDTEIVLLTPIQRSSHSQKLPMFVDAILLAGEKLNCPAINMYEESGITEAVEAKEHKYLYDGLHPNALGQQLMGEVVIKHLIDLYENKQMDKKREKLKITEWAIEDRPREKMMLHGIRALSNAELIAILIGSGNVDETAVELSQRILNSAGNSLNNLGKYGMDDFVKPFKGIGEAKAITIMAALEIGRRRRDEELPRRPSISGSADVYNLLRGQMIDLPHEEFWVLLLNRANRVIDTIKVSQGGTSATVVDVKLVMRSALQQLASAVILCHNHPSNNLNPSQADDRVTEKIRSAAALFDISVLDHIIVGEDGYFSYLDEGRLMPYFSIIIPVYNRPDEVNDLLESLSKQTYKDFEVIIVEDGSTVCCADAVKRYASIVDIHYYYKENEGRSIARNYGLERAVGSYFIFFDSDCVIPEGYFEALNAVLNRHYTDCFGGPDAAHDSFSDVQKAINYSMTSFLTTGGIRGGKVQLEKFTPRTFNMGFSREVYARVGGFREMFSEDIDMSTRIRQAGFGISLIRDAFVYHKRRISMRLFFRQIYIFGMSRISLYLLYPDTLKLVHWFPACFVIGTLAMIIASFFWWPAILPLVIYLFAVFLVSWCVNKRLKIAALSVVASIIQLGGYGMGFLKAFFYKVLLGRGRDEAEEVRLRKGKMYETEFTISELRFLFSLFFMEYGMRLDKNLRSCFNLFRDRLRPMLKQIGVRDMQSIAGYMINSQDIKNGTCIRLDGKLYFCVEFLHVKPGKGNTIMRTKLKDVVSGRVLERRFNIGEKLEDVRVERRPYQFSYNEGEHYHFLNQETWDDLIINKDLITGVDFLKEGMVVEVVSDASTETVLFAELPVKVQLEVTYTEPGLKGDTATNTTKPATVETGATVRVPLFIETGEMIVVDTRDGSYIERAKMKRTFQPSNRKRINKHGFRLRMSTANGRRVLASRRAKGRAKLTVSDERHPFMRFITGLLVTGLLSSSVFKVGAVAPKSEVNDTIVDLRPLVYEQPFQRKADKITDAKWFQMTYVGVPLVIAGLSVKHGSEHFRQLREDFVPNFHYGYDDYLQYAPAVVMLGLKGFGVESRSSWGRMLVSDAFSVAIMASVVNTIKYTAHVRRPDKSNYKSFPSGHTATAFMAAMMMHKEYGDRSPWYSISAFTVATATGISRILNNRHWLSDVLAGAGIGILSTELGYYLADLIFKDKGLNFESPRYYPLLENPSFVGLYMGFISGLGSIDIGNGLRINTNIGSRMGVEGAYFFNKYIGCGGLATVSNIPVSLNNRPDVTLEAIDESRVMAGAYFSYPFTRRWNLGCKALAGYSYILDRSIGRDEIKLGNNGFAWSAGVSVGYVLKRNFGARLFCDYSSTSTSLGLSPSTELGIMDISSKNRTIHALTWGATANILFMLHIYKASAGSGKTYTLTLEYIKLLLGYRDEQGRYRLYRKSDAQHRRILAVTFTNKATEEMKHRIVFQLDILAHDTEKSPYVDGLMQLFGCTVEQIRGIASETLYVLLHDFSYFNISTIDRFFQQVLRNFTREIGLQGSFEIEMDNDFVTASAIDRMYSELSDIDQKGLLNWLIHYAEERIESGNWWSLGNRSERKDDLRELAGELSKETYKLFRNEILSQIKDKSVLDDYLKEMRRIRVEFESLLRKLGEAAMAVLERYGLSPDDFKGKGRSWIQYLKKIVDGKVEPPTQTFRANVGNRDGWFLKKEIPACIDSLYEELNPVLQEMVNCFGEPYVRYNTAVQSSKYIYALGILVDIDRRIEEYEKEHNVLLLSDTAGILNAVINENDAPFIYEKIGTRVNHFMIDEFQDTSKLQWQNFAPLIGESLSHDHTDLIVGDVKQSIYRWRNSDWSLLNEGVQSLFRPSQYSERSMNMNYRSCACIVEFNNRIFGEAARLLQQKLEREIEESALVEGSFDVKIEKAYADIGQRVADSNLLRSGHVSVTMWESDKKEDFYNDSLARIPDLLRDLQDRGYTPGDITFLTRTAREGTMLVDLLLRLNSENTDGRYRYDVISSESLLIRNSPIINLLIGILRYIQDPSIELNRLLAVYEYNSRKFKASDDAVILSYFEDRENIGRHLDNDFFSFVESIRKEPLFEMCERIVSYFSDEGADEGERVYIQAFQDYVLDYCRTHTADLGSFLSWWDDNEDKLSVTTPQEQDAMRVMTIHKSKGLEFKVVIIPFCNWSLDHQSNQTNFVWCHTHEEPFSRIPVLPLRYGSSLAQTYYATEYFDEKMYACIDNLNIAYVAFTRAEEELHIFAPAVKNKSDKGRFGSISAMLGEVLFPEGNDGGDLRYEAGIDWRAEKKKKNVSAVPAFPAGIYRSIEPGNRLHLRLQGKGVFGEGKDRTYGTLMHRILSQIETLDRVDDTIAAFVRSGELSESESKSIREDINRWLADERVSSWFSPGVNVWTEREILQPDGSFYRPDRVVETDNEVIVVDYKFGNVERASYKRQVNTYTSLIEKMGYDRVSGFIWYVSLGKLERVMKKNNDWKDRLNVVYSTNPDFKFDNGEEDEPETLEPGKQQLRISLDKRNRNGKSVTLVTGFVGTAEDLKALAKKLKTKCGVGGSDKEGDILIQGDFRQKVLEILLSEGYRARIIMPLLPPFAIFVEYRMRFGIANPEIQFPFVSALTFRYICPQKMKDITRHHDIFFANRLSLLRIWLCISTLFFTIETSFALNPSRYATQSQLADGYWVKVAVYESGIHQITYRELRRWGFSDPSAVTVFGYGGAMLPETFSENDIDDLNQLPVIRTDSKILFYAQGPTSWSYNEKTKEYDHEQNTYSTAGYYFLTDSKNQSATIAEREGGQTTGLQDITSFDEHAVYEQELYSPGSTGRLFLGDDFRYTTSKSFTFELPGVDNSSPVKLRTSFGAKILGGTATLVFTRNGQTLPSSNTDNIGAGSSSSYDFVRMTSTLKEIDLDSEELAFTLLFRQNGGSLSMARLNYFRFNYKRKLQLYNGSIQFRLGQLPANSCYNLQGYSATTHIWDISDPLNPVSIKPNVNNGNARFVPTKGNEEYIAFDEQATVASVEFIEKVPNQNLHGLTTPDMVILTPKEYISYAQSIARLHNENDGMEVAVIDHETVFNEFSSGTPDATAYRRLMKMFFDRKGGLDGEPLYLLLFGKGLYDNRKIGETGKYVKYPTLLTYQHGSGTDERQSYTTDDYFGFLDDDSGNRIASDKLRVNIGRLPIKSEQEAKDVVSKLYNYIENNDKGSWKNQVLVVADDENYAIHMEQAEEICSIMENSDAHCFINKVYTDAYTAEIGSTGRTYPSAKKKLLQILDDGVLVVDYIGHGSTVAWTHEDLLNIGDIQSMYLKRLPLFITATCDFGRYDHEETSGGEILCLNPNGGGIALITTTRVVYISDNHYLNSGVAQQIFKKNENHEYPRLGDILREAKCNIAQTDSNKLNYTLLGDPALKLLYPDYQIKVTEINGHDITQTTPTIQARDSVSIKGEIYTPGGEKATDYNGIICPTVYDSEVTVVTHGYGEEGKAIEFKERSNRLYVGKDSIVNGIFEISFKVPREINFADDKGLINLYCYNDEGQEGNGNESNFIVGGFNDDSNEDFEGPQIYSAYLNSEEFKYGDTVNESPLFMAEVYDESGINISDAGIGHQMTITLDDKTVYTDVSSYFQPALGEFGRGFIAYPLSGLSEGEHSLRLKVWDTENNSSETEIGFTVKAGLKPVIYDLYADRNPASTSTNFYLRHNRPDAVINVTISVYNLMGVEVWRYTGKGLSDMYKSYPITWDLTDGSGTRVPGGIYLYKAIISTDNEHETTRSKKLCVTGREMYNSESKSTIKLPEPSLRRLPWYLAYIKLLQTKGEEYVSSTQIAKEIGVDSSKIAKDLSFINISGKTRVGYEINSLVAVLEEFLGFTSMHKAFIFGVGSLGAALMQDSGLSQYGLEVVAGFDVKPELTGTFINHIPVYPLSQFTQKQKELGVQIGILTVPIDKAQSATEEMIAGGIKAIWNFTPYRIRVPKHIVIQNTSIYAHLAVMFNRLNNIKMKIIAVGWNYRGHNAEMNQKETPQNPIIFFKPETALLKDGKPFFLPQFSDRIEYETELVFHISRLGKNIASKFAHRYYDSVTVGIDLTARDKQAEARANGNPWDIAKGFDNSAPIGKFIPLPEQTPKADNINFSLFINGVKVQQGNSQDMIFHIDELIAYISQFYTLKIGDLIFTGTPAGVGPVKIGDHLEGYLEETKVLDFFVKMPHTIKRTQKQRILSIIACFYILLQPTYGRDRQDYAENSILAEGNWVKISTTDAGIYQITEDSLRAWGFTDPSKIKLFGYGGTVIDELFANSDNYIDDLPQIPLWRHNNKLYFYSQGTTKWSFDSASQEFVHRLHPYSTYACYFLTDRNIESSDFPTISSSLPTEIDTPITVFDDYALHEKELISVGKTGQNFFGEDFLSNSNQDFTFHLSGAQPSPIKIRVSFGAKISGSEGYIHISYNGTELPTNTSNKITKYYDSHEFLRVASPLKTVNRAEEESTISLRYASTGTTLSAYLDYIRLNYKRKLQLYNGQVCFRFINRQTDNYYQIENSTATTLVWDVTTPHRPKNITTSFDNNTTSFTPEDAQLREFIAFDPEQNFPSPSFVRQIENQNLHALNIPELTIITPAALQTEAERVAQLHREEGLTVAVIEQEKIFNEFSSGTPDASAYRRLMKMFYDRAEGNENVRPRYLLLFGDGSYNNRKSMEKLHSPECNMLLTYQSKTSIDERESFVIEDYFGFLENNSGEEIKVDKVCLGIGRFPISSIKNARLVVDKLYRYVHDKDFSSWKNNICIAADDGDEAIHAEQADRGSDTLLLKNTSQPRLGFRVNKIYIDSYYMDPQTKKYPEANRELMKQFNEGMLVFNYIGHNDPEVGFTGEGLFSRYEMDHLTNTRLPLFITITCDYCQFDAEDVSAGENVFLNPSAGAIALITTTRVVYTDGNDKINQRLMKRLLERDSNGSPLRIGDVLKLAKQDFNTEIDKNKLNYVLIGDPALKLAYPEHSIQVTRINGNSGEKNIEMIPGKNYTVEGEIRSHQNELLSDFNGYIYYNLYDKEKQFTTLAHQDKKTWTYTHRPDLLTTGKGTIQNGTFRITVTLPIDNSHSGKSGLLNLYAYDESGREANGYTDKLIVSTAVEPITEDIQGPDIKFAGINDDSFTEGILVNNPATFVCKFSDPSGIWNGNSLGKQMTLSLDGACIEENVARYYKPIAESKIPEGEFIYPLPRLSNGLHTLTFKVFDTLGNSSEVTIAFEVKENSETYTISLEEEPATERATISCQDQNGNDVTESKHTRISVTNTLGEEIWSYETTENNPFPLTWNLQDNNGKRVSAGQYYCKGYFETSAGTIVTPAKKIVVITQMKRLSFYIITIILVSLFLPVYALAANGNSTKNEFNPINTGVTSLSITPDSRGASMGDLGVATDPDANSQFWNPSKYAFAYSQAGVSLSYTPWLRKLVNDIYLAYLAGYWKLGSSDLQALSASLRYFSLGEIVLTDNQGNAQNSITPYEMAFDVGYSRKLSDKFSMGVVFRYIYSDLGFHYDESSVSDASGASAFAADISGYYTTYPIIGRNECQWSLGFNISNIGTKVSYDGGNENAFLPTNLKIGTSFLFPLAEYNTLSLNLDLNKLLVPSTPQVSNYETEEEYEEAKEKWQNTSPISGIFKSFTDAPGGFKEELREINFSIGAEYSYNQQFFLRAGYFNENKYKGNRKYFSFGAGFSLNVLKIDAAYMVATAQTSPLDQTLRFTLSFDMDGLKDLLGRRMKTRIGFGFDVHKLVEGRELWLGGIRIEHTLGLLGHSDADVLIHALCDALLGAANMRDIGFHFPDTANEYKNIDSKILLKKTVELIREKGFSIGNADITVCAERPKLNPHIPLMQKTLSECMGIDLEDISIKATTTEKLGFTGREEGISAYAVVLLEKMYSLIFMSSCILFRIYCKNSELLRSQVQSVHKNVSVENVKKRGVFGRLMGKRVSLKKYWEYKRLEYYLYSESAKFFLWWGNRQLSAYACYMDKRGLVVYPPKVLLNLEMDSDKRVLIGMSGGIDSSAACMILQEQGYEVIGLTMRMWDLPRHFPNEGQTIPQFAIEAKELAEKIGIEHHILDVRDDFKRTVIKSFTDEYLKGNTPNPCVLCNKQFKWHYLLQEADRLNCQWVATGHYARISRKNNRFILNRGADPKKDQSYFLWRLGQQELARTIFPLGDITKEEIKQYVEKKGFHEKVEKKESMEVCFIPGDYRDFLREQLPDLDREVTGGYFIDAAGRKLGQHKGFPFYTIGQRKGLEIALGKPMFVTRINPIKNTIRLGERSELLTRNMVITDVIETIPGILNTSEPVDVQIRYRSAAIPATLRKGETPNEWIVCFQSDASAVTPGQSAVIYQNDCIIGGGIIADQRLLKKYALMIRPILLLSFFIAFTANNIAQEQQYRIWFNDKPKSVHSVDEPEKFLSEQAIAHREKQNIPIDSTDLPIDPVRLKKLSELGARILATSKWLNTATIVLTDTADLSAIASLSFVKKHKSLGVAVQPVSNLKKRQKQIESESENPYGDATLQIEVHNGDELHRAGFTGKGMTIAVIDGGFLNADRNPKFDQNKIVGNHDFIDKKMDFMHGDTHGSSVLSTMLVKDSSVFIGTAPDAAYWLLRSEDTNTEYPAEEDYWVAALEYADSIGADVITSSLGYSEFDDSRFNHTWDQLDGKSAFISQAAAMGVQKGLLIVVSAGNEGGNNWGKITVPGDVDGVLTVGAVSPNLKPAYFSGRGFTADGRIKPDIMGIGATAATITPEGNTAWKDGTSFSAPIIAGLTACLRQALPDLSAQEIVGLIKNNSSQSLTPDSVMGYGIPDFYAAYRQGTGIEPSLKGDIPLQIIYREEIPVIKIKRLPIGETSITLHIYTLEGVIIQEYNVSENSETPLYTLKKGIYILAARCQSNYWTQKIQRLMTSGRKEFSLLELNACVRNTLQESLPERYWVRAEISEARIHPSGHCYLELIEKEEQSGKTVAKARATIWATTFRLLQPWFEQSTGQLFTSGIKILIQVSISFHELYGYNLTVHDIDPAYTLGDATRRRAAILQQLREEGVADMNKELTWPILPQRIAVISSPSAAGYGDFMNQIQNNSYGYKIYTALFPAAMQGDQTEQSIIHALDRINRHEELFDGVVIIRGGGATSDLNSFDSYPLAVNVAQFPLPVITGIGHERDDTVIDMVANTRVKTPTAAAEWIIARMHEADTYAVNLSHTISSEVRSRIDREKQTIQRATSALPLFIERLILGEKHKTGLLTQQIKLALRAVIDAEKNKLDHTEKTVRLLSPQSLLERGYSLTLHDNRVVKSVAELSPGDTIETIFADGKTTSRIEKTEPSKTKMAKKTTLSYSDAIAELETIVNKLQNNEYEIDELQKCTTRSLELLKFCKSKLFETDEALQKILAELNDMNMSERKVRVRFAPSPTGALHIGGVRTALYNYLFAKQNHGDMIFRIEDTDSQRFVPGAEAYIIEALEWLGIKFDEGVSYGGNYGPYRQSERKDIYRKYVNQLLDAGKAYIAFDTPAELEAKRNEIANFQYDASTRMQMRNSLTMDKEEVDSLIAQGQQYVVRFKIEPGEDIVVDDLIRGEVTINSSILDDKVLYKSADNLPTYHLANIVDDHLMLVSHVIRGEEWLPSAPLHVLLYRAFGWEDTMPRFAHLPLLLKPDGKGKLSKRDGDRLGFPVFPLEWHDPKTGEVSSGYRESGYLPEAVVNFLALLGWNPGNDQEIMSMDELIELFSLEKCSKSGAKFDYEKGKWFNHKYIQEKSNEELTELFMPILEEKGIKADKSTVARIIGLVKGRVSFIKELWDQAAFFFVAPTTYEEKSVKKRWKEETPAQMRELIEILRNMDDFSSAPAEKVVLGWIEQNGYHLGNVMNAFRLAVVGECKGPHMFDITEIMGKEETIKRIERAIEYLGMKYRQPHTLLLITLLAALFPAKAQQIAWSVDMTGFFDNREFGYSKAQSQTFFGTRLSPEIGIRIGHSTIMAGASWVQPIDGSTREAKVHPTVYYRYDTSKFRMSLGMFPRTQLIENVPAILQYDSLTYFRPNIAGALFQYIHTKGFAELYIDWRQVQTEVKREAFMAVFNGRWQPLPYLFAGGHLVMNHLARPRNSDSRYTVTDNLIASPYIGLDLTTYTPLDTLTLKVGYHISLDRLRNVGTWHHPQGILIDLLAEWRFLGLHNTFYKGGSQMPLYPQLGAQLNQGDPFYQSSTYNRTDIYAYIFRKSYLNCIASCNLHYTPGNLDFQQQLTLRFYIDDQAWKNRKGKQNRGYLKNILMKSIYNFGIYCYKQLVALAGIRNVKARKLTQGQKGIFDYLSRHADPQGGYLWIHASSLGEFEQGRPLIEAIKKAQPDTKILLTFFSPSGYEVRKDYSGADLICYLPFDLPGNVRRFLDLTKPTKAIFIKYEFWANYLNELKRRNIPTYIVSAIFHPKQIFFRSYGGYFRRILKNFTHLYIQDERSRQLLASIGIDNVSIVGDTRFDRVGDIRRTAKELPLVEAFAQGKKILIAGSSWPKDEEFITRYFNHNDNIKLILAPHEIHESHLQSIERLLKRPAIRYTQATIDTVQSYDCLIIDCFGLLSSIYRYGTVAYVGGGFGAGIHNIAEAAVYDIPVIFGPNHRRFKEAHELIACGGGFAIHNSQEFATVADKLLTNPKYLASARKNAGDYISTHAGATKLILKELFGIEEMEKEIKKPVKILFVCLGNICRSPAAEGVFKHMLRQRGITGRFEVDSAGTYGGHAGELPDPRMRSHAARRGYLLEHRSRPVRPDDFEKFDLILGMDDYNIDTLRSMADSPEEAAKVKRVTDYCRHYPVDCIPDPYYGGADGFENVLNILEDACEGIIADFYIAMKKNYFLHTAILLVALVCGTVPVWSQTYKKISSIEELTDGKYVIANEKGEYAMNSTNDGKFYTHTSISPIDNEIINPDASIIWEIKTNNGSKTINNGTSYVYCAGEKNVPIKTWADNDNGFFWNFTVTSGVFTVQSVKTTTLYLKYNAQSPRFTTYKSGQQNLTLYKLEETGKSNPELTFSGITGDITKMLADGSYSSKATTKSDATIVYSSSNQEVATIDQQGTVTLLAGGTTVIKAEVAETATFDASFVEYTLKVTDPAALKTFVKVTNGSVTGGKYIIVYQASDDANSVMALNTTNAGKFFGNTEIDLTENKIVTDDKTVMWDITLESDDHYSISNGNIFVGFKGNNNEAYIYNDYTIGECGWNFIYDENNKVFKIQNAGVNNRYLQYNTGSPRFACYTGSQKHLTLYKQEDSRTAVEVTFNEIDGDQTLFFTKGFTYNSAATATPTRPITYSSSNQEVATISTEGVVTLVGAGTTVIKASTAADNTYQEGAAQYTLTVRNTSVALPYQIDFKTEGLGDWLTYTTEGTVEWESTNYGVQANGFDKGVGEAYLISPAVTASDIVLAFSSQKSFNGNDLQLFYSTDFDPSSMSQPSDASWTEITDMATWATSQETTESGNIELHDLTTPIRFAFKYTCEANEAARWTIVELSISKGQPSGIEDVATNEMKVINGKGQVTIETAEAMPIAIYALTGAQVRQIELVEGTNIIELPTGIYLIGNKKVVVFMVIAYLRVSTSKQHLVNQQDEIRRFAHTKEIEVSRWVTEIVSGKKNQKERKLGRVINQLKPGDTLIVTEISRLSRTLTEIMTIMGKCLEKNITIYSTKDGYAFDNTINSKVLCFAFGLVAEIERNLISMRTKEALALRKAEGVILGRKKGSITKLKILVDNELEIIDRLKKGESMASICRIYGVSTDTFSKFRKVCPSVEEAFQYKMTHFYASSKMKTKILMVALMLLAMTPAIQAKSSTKTVAHRGYWKCEGSAENSLASLRKAHDVGCWGSELDIWLTSDGGLVVNHDPKTLDGLKIEETDFKTITKSKLKNGETVPSLKDYLKAGKKLKPMILVLELKTQSTPERNIELAKKVVDMVKSMKMEGQVEYIAFSNLVGTEIIRLDPNAKVAYLNGDKTPAELKELGYTGLDYHQKVLKNNKSWIREAHDLGLTVNVWTVNKADDLQYFIDEAADFITTNEPELLLELLKKMRSISNRFFYAIVVLLNVFAAGSICAQQYRPIATWPDETNARIEEFLNTTLTVTGRKVAVFDCDGTVFGQAPYYLADEALYDYADKKYKNRKDKESRQKMAILDRMVKDGNNVGKPYVEDRVHFLSGMTPEEIATLGYDCYMRSYKGKMYPEMKTLISNLKEYGFEVWILTASPEFLYQRFVASELGIPVTHVLGVKGVVKNGVMSDEIIMPIPQDDGKAQVIPTYIKAVPLIVGGNSRGDMDMLNESRGLKIVVNPDDVTVRGKEDGPMSGHTVKSYWEKEGALIVHCNDVRDKNVSFKTADFKIRTNLENPKKMQIYNNYLHIILYESKKFESKTPLLEIKSKGNENFIESMAKIEIKDALFPDCPIRNILSRIGDKWSLLVLYTLSGSSVMRFNVLQKNIPDISQKMLTVTLRALEEDGLVKRVIYAEVPPRVEYSLTDRAKSLLPCIDSLIAWAGENMAAILSDRMRSKVGMKKNILILLSLITFTAMAQTKGKFEVLDLKDFKLHVYYTNDALNDASYIVEGKNGLITLEQPLFKDNVAEFDAYVASLNKPVQTIITDYHVGGTGNHDIVMAEGMPAFTKGATYDGMMRNFAEIFGDAIVPLPTGKAEEIKFGSKQTWDNIEFYFDKGASTDFPAASIIIGNKVYYTHWTPVKAHISYLQISSPAAIDAEIAEAEKALKSGCEYFIGGHDGATGRESVEFKIDYLKKMKQILRENSTAERFISAMTQTFPSLPGENNLTDLAKALYKHMNEIIQLNSVDVYNKMYGLKTLHPLVSVVDLRKATRVVNHVKMNYGVYALFLKNGTNCTLKYGRRYYDYQEGTIVSFAPGQLVGVDSDEDEISPEVYGLIFHPDLIYGTALGKKIGKYSFFSYEQNEALHLSDQEREIIMDCFHKIEVELEHPVDKHTRELLSVNIELLLDYCLRFYDRQFYTREKVNNDVLIRFEQLLNDYFRNGESQVRGLPSVRYFADKVFLSPGYFGDLVKKETGKTAQEYIQGKIIELSKEYILGSQLGISQIAYSLGFQYPQHFSRLFKKLEGCTPNEFRNQAMSMIAAGEPLAGEEMIAFMREQSDDTRRLLFDLNGSYHTPEEIVTLFSQITNSKVDNSFRLFPPFYTDFGKNIHVGKNVFINSCCQFQDQGGIFIGDGALIGHSVVMATLNHGFAPNDRQNLYHAPIHIGKSAWIGAHATILPNVTIGDNAIVGAGSVVTKDVPDNAIVAGNPARFIRKINSMKPFIIALTLCLFVNISSCSTNDAPIVEPPNGETAGDSNTPTMNEQIRIIIGNASFTATLEDNATAKAFVAHNCKHDRTCRMTEHAGNEKFYYLPTALPTSTVTPGTIFAGDLMLWGNSCLVLFYETFSSPYSYTRIGKIDKPSGLSAAVGDRNITVTFEMKQRIKFIFTTWFIAISLFTINAQDVQTNKNDMENLNLTNEWDKTFPQSDKVKHSKVTFRNRYGITLAADLYMPKNAEGKLPAIAVCGPFGAVKEQASGLYAQTMAERGFLTIAFDPSFTGESGGAPRYVASPDINTEDFCAAVDFLSLRDDVDSERIGIIGICGWGGLAINAAAIDTRIKATVASTMYDMSRCTANGYFDENDNADARYEMRRQLSSQRTIDAKNGSYATAGGVVDPLPQDAPQFVKDYHAYYKTSRGYHSRSLNSNNGWNKTSALSFLNAPILAYSDEIRSAVLLIHGEKAHSRYFSEDAFKKLKGDNKELIIVSGANHTDLYDRTDIIPFDKLESFFKGYLKMLPEIKGEKYMTVLPEDPMILFSFINTKLRDNYVSLDELCDDMHISKADLVAKLGSVGFEYNPQQNKFWMVDRQPYTFDRVIRILFGVVSVVGLFYLVYILRGALLPFLVAWIVAYMLNPLVVYNKRVFKLKGRVVAITLAFLEVLITISLLCVLFLPSIIDEIAHMRELLSEYVYNSSSIPFVPQAVHDFIRDNINFSELSGLLSREQWLSIIEESFSGAWGFITGSVGEIINIVSWLVVLLYIVFILLDYDRILCGFQRMIPQKYRPMLVSIGNDIEESMNRYFRGQALVAGLVGILFSIGFLIVGLPLAIVLGLFIGVLNMVPYLQLIGIIPTILLCLVSASDTGTNFWLLFGACILVFIIVQIIEDVFIVPRVMGKVTGLNPAIILLSLSIWGTLLGFVGMIIALPLTTLCLSYYQRYVIGADSVEPPDSPTDTSVSEEVQEMVLTESNYETNRRGSIEVICGSMFSGKTEELIRRLKRAKIARQRVEIFKPAIDVRYSEENIVSHDSTSILSTPVDNSHSILLMASGVDVVGIDEAQFFDEGIVEVCSELANNGTRVIVAGLDMDFRRVPFGPMPSLLSIADDVYKVHAICVKCGHLANYSYRLVDNDKRVLLGEKNEYQPLCRRCYLQEMQAREDKEHSDMKGECRDVKNGCFSLFYRAVFCLVFIEEKISRRKKRCCLHGDSIFHLGEIVWERLPKSNYLFTFVENIKIGIMMAKRILLFLLIFSALPVIATTQQIIDKFVSDPAFIPSSIGICITDVKTGETIASYNERQAVIPASTIKVITTATALRLYRPSFCLYTTVGHTGTIDETGTLHGDLVIHGGGDPSLGSAYRSRHTEDFIDQIIQRALANHIKSIEGRIVVDNSLFDEPAISPKWMVEDIAWDYGTGCHAFSYKDNRIEINLRYNGKSYDVTGVNPPNRFVVETSLTKGEKENITVKCKNNRYTISGTIPKRKDRYRLYLSIARPDNLFITDLQEKFQTAGIEVKNSNLGQLPETTWFHYPSDYLGDIVHSLNVRSDNLYAESVLRLLSLSAHEKGSAEKGIDIIRKYWQNYEADSLELFMYDGSGLARNNKVSAKYLNCVLKETARDSLIGEYFVQTLPLAGKEGSVATIMKHGELPGELRLKSGSMSDVHAYAGYYTTPQNRYAIVVMINNYTCTRAQLKQKISTLLTQVLSKKEMLRDSRIVHIIDLLGELRELLFVIDQAGDTAPAILLKLAKEKAEEITRLTRELRQPEFWDGILRYDPFTSVKTTTHEDAIPSMENPLEKVGEPVSSHITDENIIPTEKQSEESGEELDTDNNIADTEDYSESPIIENNEPTHKNDTEENEEENDTLYPWEKLNGEELSAVQDENDDEYEDSNEFDEDMEEDYEEPDLYEEENTEEIIEEEEPATPVTLEEALQRQQAKELRKALSLNDRFRFRRELFGNSDIRMNETLSLIDAMQSYEEAEDYILNDLNWDVENPDVAEFMKIVQKHFLMAKLYVVPTPVGNLEDMTFRAISVLREVDCILAEDTRTSGILLKHFDIHTRMQSHHKFNEHQTIEGIVSRIEGGENIALISDAGTPAISDPGFLLVRECRRRDVTVECLPGATAFVPALVASGLPNEKFCFEGFLPQKKGRATRLTELAEEPRTIVFYESPFRLLKTLIQFKETFGGERAASVSREISKIHEETVRGTIDELITHFSEHEPKGEIVVIIAGAPDKPKEKKKEKYPKSDTYLMKKAITAAIAASVLMIGCTNQSTEVRKLQAENDSLLRVNAQTTADFNEMIQLMNEVEDGFRQIKEAENYLVTQKDANGEVSLTTREQIKNDMTLVAETLQKNKERLEKLQKQLNQNKNQSAALQKTVTRLQNEIEEKTQLITSLQESLAKRDVRIAELDEAVTNLTGQVEHLTTENEQQKEVLMTQDEALNTVYYALGTNKELKEQKIVEGGGLFSSKKVMEGEFNKNYFTAVDMRKLHDIPFDSKKAKLLTNHPEGTYELQKDNEGYLTLVITNPDSFWSLSRYLVVELNMDRYLPALLALLLFTSCDSFFEKESVLPHNPERPELPPARDRRFVVDSIQYHFDYWSRKSTQQADEICLTIFSNSLDSEWRFTPTLEEPLYNYSCFSSEDPVFAQIYTDTLLVRTPCYVDDDNRIILGDSLYSFQQITQQTLAEIDRTGEETIIPPHTETYFYGRYSITYYDIAYTIWLTEMTSQTPITIEGMWQGGIINDDLTIRIESHPLMENKPFIFGVATSGDNFTDREKETERLLLNFRHGVNTVLISPRRWGKTSLVQKACGLAQSDKLKVVYLDIFSCRNDKDFYTAFAAAILKQTSSKLDEWLENAKLFLSRISPKISIGTDPMTDFSISLEMNPKSHDVDDILQLPERIAQKKGCNIVVCIDEFQQIAEFKDSKTFQKRLRSVWQLQKSVSYCLFGSKKHLMNELFEKKNLPFYKFGDAIYLQKIGTTDWIDYIRRRFEVTGKQISKELAEKICQRVDNHSSYVQQLAWLVWIHTDKTATEQDFEAAYQDIIDQNTPLFEKQTESLTTYQMNFLRAVIDGVHSEFTTQEVLQKYQLGSSANVSIIKRALVKKELIEIEKRQVVIPDPVMKVWLKKELGIMSKDTILSSIEDAVEDFRQGKFLIVVDDEDRENEGDFIIAAEAITPEKVNFMLANGRGVLCAPITMQRCEELNLYRQVNHNTSMLGTPFTVTIDKLEGCTTGVSSHDRAATIRALADPSSTPETFGRPGHINPLYAQDKGVLKRAGHTEAAVDLARLAGLYPAAALIEILNEDGTMARLPQLAKVAEKFGIKIIAIRDLIAYRLKQESMVERGDEVDMPTEYGHFRLIPFRQLSNGLEHIALIKGSWEPDEPILVRVHSSCMTGDIFGSMRCDCGEQLHKAMQAVESEGKGVIVYMNQEGRGIGLMNKIRAYRLQEGGLDTVDANLHLGFKADERDYGVGASILRDIGVRKLRLMTNNPVKRIGLEAYGLEIVENVPIEVTPNEYNRRYLLTKEKRMGHTLHVEEMFYIKRLYRFILKSFLPLFLMTFFICLFIVLMQFLWRYVDEMVGKGLEMSVLAELFFYAAVTMVPMALPLAILLASLMTFGNLGERLELLAIKAAGISLLQIMRPLVIFLIFVAIGAFFFQNNVLPKSQVKMWTLLYSMRQKSPELDIPEGVFYDQISGYNLYVKKKDHKTGMLYDVMIYDMSAGFDNAMIILADSGKLKMTDDKEHLFLTLYSGESFENLRDQRTSTSNIPYRRETFSLKEIMIAFDANFNRMDDGIMQNQYIGKDLAALQSSIDSMTYRVDSIGNNYANSLKVSGYFALYDRPGMHVSKEDSIREQKAVAEAAELNLDSLFDGGSLQRKQLYLDRAVARAGRYKSDYEFRSYTMGDENKVIRRHQIEMYKKFTLSFACIIFFFIGAPLGAIIRKGGLGMPVVVSVFMFIFYYIIDNSGYKLARDGRWEVWEGMWLSSAVLLPLGIFLTYKAVKDSAVFNPDVYINFFRKLIGRQELRKVVLKEVIIEDMNPMEAIERAHRLSDSCQRFLDKVGRKRQSYWKYCLYGYNKSDIIALGNQINELVDYVSNSHSQMVISKLMDYPILRNLWVYRPAPSVKWGYVLAALFPIGLLLYWIGSRQQRLLRNEVEAIVHTNEELCVQLEKEESDRIEENKTVMNKEKFIVEYDLKSVSPTLLWSYIGTKNGLADWFADDVQNEEKLFTFFWNKSSQQAHQIAVRSGSYIRFHWLDDEDEKSFFELRISSSELTGATMLVITDFAYPDEMADSRGLWDHQIETLRRKLGVMNLMERMVEQARANKQRIVLPEGTEERTLQAADRILADNIADIILIGEPSEIMELADRYKLKHIDKATLVNPTNHEKKETYTQLLYELRKAKGVTLEKAEKMVEDPLFLGCLMIKNGDADGEVAGARNTTGNVLRSAFQIIKTAPGVKVVSGAFLMFVPDRSYGEDGLMVFADCAVLPNPTASELAQIAVSTAKTARDIANIDPRIAMLSFSSKGSASHEMVDKVVEATRLAKEMEPSLKIDGELQTDAAIVPAVGASKAPGSEIAGHANVLVFPSLEVGNIAYKLVQRLAHAEAVGPILQGIAAPVNDLSRGCSVDDIYKMIAITCNQAISLKKMKILVLNCGSSSVKYKLFDIDSKSVLAQGGAEKIGLEDSFLKLTLPNGEKVILKTSMPEHHSAIQNILNVLTGKEYGCIESFDEIDAVGHRVVHGGEKFNKSVLITDEVIEKIKECYDIAPLHNPVNMAGIEAISKLMPTVPQVGVFDTAFHQTMPAHAYMYALPYDLYKKYGIRRYGFHGTSHRYVSKRACEFLGVPYEKQRIITCHIGNGGSITAIKDGKSVDTSMGMTPVEGLMMGTRSGDVDAGVLTYLMDKEHLDSAGVANLVNKKSGVAGISGLSSDMRDIEAGVAAKNERAILALQMYEYRITKYIGAYAAALGGVDIIVFTGGVGENQTITREAVCKPLAFMGVEIDPEINKQIHGTECVISTPASKVKVVVIPTDEEYMIASDTKAVLSGKMKMKRKILSIAFGLVVVPSAIMAQTAATEHTIRANEAVKTELDFNDRQDFEDASRGFIATVNTSAIMTEDGKESYSLEGWDFLKNDVPETANPSLWRQSQLNRFNGLFEVIPDKLYQVRGFDIANMTFIRSDHGWIIIDVTTTNAAAKAGYDLIKKHVADLPVEGVIFTHPHGDHYGGIAAIREGSSKKDFEIIAPKGFMASAQNENVLAGVAMTRRATYMYGLQLEPSVTGNLGCGLGQAMSTGSKGIARPTIEIETTGEKHTIDGVEMEFVYVLDTEAPVEIMVWFPQMKAFCTAEDMTHNMHNLQTLRGAKVRNGLLWSKAVDTAIERYGDEVEVSFATHHWPTWGNERIVDYWEAQRDLYRYLHDQTLHMANRGLTPNEIAEEMQLPASLASQFHCRGYYGTLSHNVKSQYDLYFGWFDGNPAHLNPLPPTELGTKYVEAIGGAEKVLEVARASYDKGDYRWVATLLDHLVFAEPQNMAARRLLADTYTQLGYQAESGPWRNFYLTGARDLLKSDVPYTSQLINDGVLAQMDMGMLLDYCAIQLNGEKAADKEAVINIDFTDTNDKVVLILNNGVLNHRLNRQEKEADLTLSIAKMDFVKLFFGRTDTEALRNAGKIKMQGDEKAIEMLRCCFEAADSNFKIVLPMQDQIFTFETLLRRMQLDDGERPFVIWREKDLFGAHAYPVKIDVPCLFLCWNGEMEIEINLQTYHFDKEHLLCFTVPCACRIVKRSPDFLCVGLLLSKSFWRQLLFTERTLSSIAAHDAFIIVTEEERNRLARFHELLCLCADTTEHDPIGTLYPLIVGLFFQIRNICQNREATAAPASHSKKILYDFLDSLHTNYRQHRRVSFYADALSLTPRHLTTVIRQASGRSASQWIEEYTVLEAQILLRNSPMSIKEIAYELGFNDQSLFSKYFSRVAGISPERYRKISMSNTMDYSQFLIMRGEISLLLVFLLIFLFDTFGGKKSLKGLSITACVLFALHTVWNIIPVDSATAFGGMYQTSPIASMVKTVLNIGTLIVLLQSISWSDTPDVKLRRGEFYELLLVTLFGMYLMVSSGHFLLFFIGLETASLPMAALIAINKKDTESYEAGAKYLFTAVFSSAVFLLGLSFLYGVSGSLYFGDIAVAIASNHTPLLIATLVFVLAGMGFKLSLVPFHLWTADVYQGAPTQVTSYLSVISKGAAAFALMLILYKVFFLDPVIWQGIMWALIVLTITVGNLFAIRQKNLKRFLAFSSISQAGYIMLGIIAGSAQGMAALVYYVLVYIFSNLAAFGVISSVERSSGKVGMDDYNGLYKTNPKLSVVMMLAMFSLAGIPPFAGFFSKFFIFASAIHSGFYILVLIALLNTIISLYYYLLVVKAMFINNENDCAIAPFRSDNASRVSLIVCVAGILLLGIVSCVYTYFTDLSLIGAMNFLSLFVLIPLLMMLGLWIARDMKQIRTVAVIGSTILLALSVYTLVEFLAERAAGNTATMLFTDSRMWYASLNIHYAVGVDGVSVAMLLLSSIIVFAGVFASWKINPLPKEYFLWFMLLSTGVFGFFISVDLFTMFMFYEVALIPMYLLIGVWGSGRKNYSAMKLTLMLMGGSALLMIGILGIYYQSGLHSMNVVEIAEHGNIPMNWQYFLFPMTFVGFGVLGAMFPFHTWSPDGHASAPTAVSMLHAGVLMKLGGYGCFRVAIYLMPQAATELAWIFLILTGISVVYGAFSACVQTDLKYINAYSSVSHCGLVLFAILMLNTTAMTGAVMQMLSHGLMTALFFALIGMIYGRTHTRDIREMGGLMQIMPFLSVCYVIAGLASLGLPGLSGFVAEMTIFVGSFEHTDTFHRVFTIVACTSIVITAVYILRVVGKLLFGAVQNEHHRELTDAEWWERLSAITLIVCVAAIGCFPNWIADLIRQGVEPITNLLSQALMEYSVIILLLPLCMFLFLGLVGHKLSERVAGILGTIGLSVAAVLAYVVAFNYFTMPRNAEGVFDTLQPINFEWLRFTEHLHIDLGILLDPISVMMLVVITTVSLMVHIYSMGYMHGEKGFQRYYAFLSLFSFSMLGLVVATNIFQMYIFWELVGVSSYLLIGFYYTKPAAVSASKKAFIVTRFADLGFLIGILILSFFTETFDFATLMSNPSALVSETAGMTFMGCSVAAWAMALIFMGGAGKSAMFPLHIWLPDAMEGPTPVSALIHAATMVVAGVYLVARLFPMYCAVPEVLELITWVGAITALYAAVVACVQTDIKRVLAFSTISQIAFMMVALGVASDVDLHTGLGYMASMFHLFTHAMFKALLFLGAGCIIHAVHSNEMSEMGNLRKYMPVTHITFLIACLAIAGIPPFSGFFSKDEILTAAFEKSAFWGVWMTAVAGLTAFYMFRLYYRIFWWSKPSYEHHTPHEAPAAMYLPLVFLALVTCVAGFIPFGEFVSVNGEAYHIHLDWSVATTSIIVAVAAIALATWMYLSENTKPKALADKFRALHTAAYHRFYMDELYMWVTHKVIFQRICRPIAWFDRHIVDGTMNMLATVTNGVSYGIRKLQSGYIQWYVWVFIMGALLIAVLAMCFMEIPMIAYLVVSTIMFFAGVYGFVTRKNMLAMLISLELMLNAVDINFVVFNRYLYPEALEGFFFTLFAIGIAAAETALAIAIIINIFRHIRNVEARNLDKMKYMEQIANQVIFGLLALVIVVCSILTVTTRRILRAATYLLFVLFATAGIYFQLDYTFLGAVQLAVYAGGIVVLFVFSILLTSHPGDKSELLTPKKRVVGLIASIFGAIVCGYTLFTYPFFTKPLTSVITGEVDMKEIGHALMGMDKFQYLLPFEAVSVLLLACIIGGIMIARKRMGSFKNYITSFWKGLLSLLKGMGVTGKYFFSRKVTEQYPENRATLKIPERFRGTLTLIYDENGQHKCIACGICQMNCPNGTIKIEASKITTEDGKTKRVLDKYVYDLGSCTFCQLCVTTCPHHAIKFTNEFEHAVYTREKLVKQLNRTDNPTENNMRDLKGRIGSVASSEKITGAMKMISSAKMHKAESALRRVRPFRDQIQNTIDHLISADAEYSSPLTEIRPVKRRAIVLLSSDEGLCGAFNMNLFKRTLEIINQARMAETENPVMFVVYPIGKKASKFAQKLVGDNVDVTADEMTAKSSAEDIARFTGELTREFIAGKVDCVEVVYTHYKSASKQILATRQLLPIAADDLATGEKVERNKPYLFEPDVNTIYNEVLPLYVLSSMQEAICSNRVSEQAARVMAMQSANDNAKELLDELQLEYNKLRQQSITSELLDIIGGKVDMIKPSEISDILKKQLDEVDSKINFEEVGTVLEVGDGVAHVYGLENVRSSELIEFENGVHGVAMNLEESNVGVILLDNVDKVTENMTARRTGEIASLPVGEGLLGRVINTLGEPIDGAGPIQGDLIRLPLERKAPGVIFRQPVNEPLQTGIKAIDSMVPIGRGQRELIIGDRQIGKTAIAIDTIINQRDNYKNGNPLYCIYVAIGQKASSVAALVNTLKEHGALDYTVVLAANASDSAAMRYYAPFAGAAIGEYFRDSGRHALVIYDDLSKQAVSYREISLILRRPSGREAYPGDIFYLHSRLLERAAKIINNDEVASSMNDLPEVMKPMVKGGGSLTALPIIETQAGDVSAYIPTNVISITDGQIFLETALFNQGVRPAINVGISVSRVGGNAQVKAMKKIAGTLKIDQAQFRELESFTKFGGDVDPVTAMTIDKGRKNERILIQPQYSPVPVEEEIAIIYCGTQGLLHNVPMDKVAEFEKLYLQILKSKYSHEVMDELRAGHLDDKIAALMTEVAEEVANRFKAMNEGLIPSRYAKALYKYAQEHHVAAPIYEEMKRLDAAFATHTELSKALSNPALSAADKVRVLSSAFGEKPDDYLLRFVQLVIRNRRETFARAIALAYQDIYRRANHIARVTIITAVALDKEVLDRIGDLMKKQTDKTLEFVYEIDPSIIGGFILRVDSMQLDASVNSELKKLRLKLLNSKMELFTPEFGLVFWMFVVFVILFAILAKFAWPYIIRSLDERAELIDKGVEYAQEAKAQLDNAQADAKALLVEAQKQQMEILHEAAQMKTHIIEEARQAASVEAKKVMDAAAVSIEQARKESELQFRREVSEFALQIAEKMMRKQLSDDKTQVEMIDKLLNEIENQNMLGMILLQAAAGASLAKLGACIGAGIAAIAAGIGIGKIGSSAMDAIARQPEASGDIRSNMIVIAALVEGVALFAVIVCVMSLFLMRKQIAYIVAFLLTVFSFPLSAQEKADGEGEKSFDPKETIFEHLLDGYGWELPFSHEHKIPLPVIVRDYKGDWKIFGSHRLEHGQTYEGFYVAQDGPNKGKVESVDDRGNRYRPLDLSITKNVLALIIAAFICGWCVLSVAHWYRKKRFKAPKKGVGAIEFLIEFVYTGVIKSTLGDKAPRFAPYLLTVFFFILLMNLLGLIVIFPGGANLTGNIAVTMVLALCTFIVVNVRGTKEYWKEIFWPDVPLWLKFPLPIMPLIEVFGIFTKPAALMVRLFANMMGGHMIILSLISLIFIFGAFGAVVIGATTVVSVLFSLFMLLIDTLVSFIQAYVFTMLSTLFIALAQVDGHHEGKVEEIKMVLEIISSEQILFKGEVESVTLPGAKGSFTVLENHASLISTLDAGTIEYVTGGERHSVSVGGGFVDVDNNRVAVCVRMADKFGYITQVIGPVVDVAFEGEGNEVPPIYAALKIERENGAELIVEVEQHIGENTVRCVAMDSTDGLKRGMKAIDLQRPLSMPTGSQVKGRLMNVIGETIDHLPALDYTELKSIHQEAPAFDDLSISTEMLYTGIKVIDLLEPYSKGGKIGLFGGAGVGKTVLIMELINNIAKGHNGFSVFTGVGERTREGNDLLREMIESGVMSYGDKFKEGMERGEWNLRDVDMEKVNESQATLVFGQMNEPPGARLRVALSGLTVAEQFRDSDGGGKEILLFIDNIFRFTQAGSEVSALLGRMPSAVGYQPTLASEMGKLQERITSTKQGSITSVQAIYVPADDLTDPAPATTFSFLDATTVLSRKISELGIYPAVDPLESTSRILDPNIVGEEHYQVAQGVKQLLQHYNELQDIIAILGVDELSDEDKLVVNRARRAQRFLSQPFHVAEQFTGLQGVMVPLEETIRGFKMILNGEMDEYPEQAFLNVGTIDEAIAKGKKLLEQAKTAHMFDFSIVTHWIDNLLRSVMPGWGALLVEFVLVGVVLLLLYAVLALFYIYFERKVCAFFQCRLGPNRVGPYGIIQSVADMFKILIKELITLNHIDKFLFNLAPYLVIVASMLAFGCLPFGRGLQVIDFNIGVFFLIAVSSIGVLGILLAGWSSNNKFTLIGAIRSGAQMVSYELSIGLSVLTMVVFAGTMSITGIVEAQTNGWFLFTGHIPAIVAFLIYLVAGTAETNRGPFDLPEAESELTAGYHTEYSGIHFGFFYLAEYLNLFIVSGMATLLFLGGWMPFHIPGWEGFNHIMDYIPSVIWFFGKAILVSFVIIWFKWTFPRLRIDQLLRLEWKYLLPLNLINLFIMVLIVIYGLHFMANIQQEISSFLPEATFVEGTILEVSVPDAKWHDLALYLHNQLHFDYLVSIVGMDWGETVGCVYYLTSTVDNSQVSVKIETADRENPLLHSVSDIWKSANLYEREVYDFFGIRFINHPDMRRLFLRNDWVGYPFRKDYNADPELNPIRLEHESVDDVTHSVVETEDGKLEERTNTIFSPQEFVVNIGPQHPATHGVLRLRTSLDGETVKKIDVYCGYVHRGIEKLCESLTYPQTLHFADRLDYLSAQQNRHAVCLCIEDALQVEVPARAQYIRTIMDELMRISSHLLFWSTFCMDLGGTTAFFYGFRDREKILDIFEETCGARMTFNYYTIGGLMADLHPDFQRKVKEFCAYMPAKLKEYHTLFTGNVIAQQRMKGVGILSREDAISYGIAGPSGRASGWACDVRKNHPYAMYDKVEFNQVIRTEGDVFARYMVRLDEILESIHIIEQLIDNIPEGDYAVKMKPIIKLPEGRYFRQVEASRGPLGIFIESHGDKNPYRLKINSACLPLVAGLDPMCRNGKIADLIAIGGSLDYVIPDMDRMEVKIKSMKYEDFKDNEYIEHLVDELKASHTNVVVGCLDELINWGRSNSLWPLTFATSCCGIEFMSLGAARYDMARFGFEVARASPRQADFVMVAGTIVHRMAPVLKRLYDQLAEPKYVVAVGGCAVSGGPFKNSYHVLKGVDEILPVDVYIPGCPPRPEAMFYGLMQLQRKVKVEKFFGGVNRQEKREKVFGKMNSALFVVVLITGLALVGAALLIAGLISPRSFNPQKGEAYECGIPSRGESWMQFKVGYYLFAILYLMFDVETVFLFPWAVILKDLGVAGLFNILFFMVILVLGLVYAWKKGALEWKMSHKYTNFISNKSLTLDSFLFLIRNSGQIILLLEHHLKKIARQKMKSSLKLFFSLFLAAGSFTAFAASYTDGIEYFKAGQPDRAKILLERTLDDAGTNKAESYYYLGEIAFGNKDYTAAAEYYKKGLEADPLFAYNLVGQGKLALNGSADKEQAEKVAEKYFKEALKGKNKKDAGLNLAIAKAYYETGTPGYEEYMKKSYKADKKFPDYFMFEGDVLVNQQQYGDACGRYENAIYFDPNCIEAYVKYSHIYFDINPTLAIQKLEELQTIAPNSAIAQREMAEAYYKNSQYTKAAEAYEKYMQNPNHFQTDRPRLATLLFYGKRFDESLELAKDILSHDPQNFVIRRIVMYDNYELGNFEAAEQAAIEFLGMNPGDNVFTARDYMTYGDILSKQKKYGEAVAQYEKAYELDNTRTDILKVLSDTYERNKDYVKAIDTYEKYMNADTVNNQRVMDYYLLGQICYSAGQAAQDSVELMNMYLLKADTMFQVVVERSPTDYRGYLWRSRAAAVRDPELKEGLAKPLYEETLTVLDQDPSNKEKAATKRVYIEAYKYLGYYNYLQTTNPAKKNEAIAATKDYWNKMLELDPGNTEILEALKTLDSLMNKLILLPVAIFVAASALSSCSSCQNEEKEGQKVKETITSGVIDISCDESFEPIMEQEIMVFEAAYPKASIIPYYVSESEALNMLLQDSVRLAIATRPLSPKEEDSFKSRRLKVRTVQIALDGIAFIVNKSNKNDIISVDDLRKIVTGEVTKWNQIYPGSTLGDLHFVFDNQGSSSMRYAIDSLCEGKTLYKGLFAQKSNQAVIDYVAQTPNAIGVIGASWIGNKADSTNTSFTDVVKVMAVRKAPGFKPYKPYQYYIASGDYPLTRPIYMITTDPRNGLPTGFIKFVSSQRGQLIIFKTGIVPWQTNIALKRDVSITDAFMEEKYGHYNDDTEKKNRLGMNVVFGMIMIAIYLGMAYLLLFTSLFSNLYDIVRYIMGGVFAVYGVFRGYRLFVGMKMSKNVDLTSKEWCDLVFEGKNKAFGGYLLRVNSPKRYTWATVGVICVVAFAFVLPYIVESFKFGEVEEETTVVVEMTQLPEAEVEKQEVQPLVETPPPPPLKSSIKFTAPVIKKDEEVSDEEELKSQDELTQSKVNISIADVKGNDEEHGQDIADFREVIAEPVVEEEKPYEAVEQMPTFPGGETELMKFIRDNLKYPVIAQENGIQGRVILRFVVSKTGTIDNVTVLRSLDPTCDKEAIRVVKSMPKWIPGKQNGNNVPVYFTLPVVFKLLMAEVEVKDSGKGGKKGQQKKMKIHVDFTPMVDMNMLLITFFMFCTTLSKPQTMEISMPTNDKVTEEEQNKVKASEAITILLGDNDRVFYYLGEPQYEDYTSLIETSYNADGIRALLLDRNKEVVAKVKDLKERKKREEISEEVFDSLVVDAKKAKGAPVVMIKAKLPDEEGKNGATYRNLIDALDEMIICSIGKYAIVDITEGDLFLMENYEKKGALSDQIDTSKKNMAKVKVKRKSTLIDMTAMSDVTVLLLTFFMLTSTFVQKEPVQVSTPSSVSEIKIPEINVLQVLVEPSGKIFISLDKQEDRVNVLNAMSSMYGVPFTPEQINKFRLANSFGVPIKQMPGFLDLKSDIQDQTLKNYGIPCDSANNEFKEWVRAARKANRDLKIAIKADQATPYDKIKNVMSSLQDIKENRYNLLTSLKTLPAEEEQMEAKKAKKNKVRGIKNAFIVIIICFIVALVVFTQVLGAPENFEGGDPAGGHPLNLLGTIYKGGFIVPILQTLLLTVIVLSVERFIAMLSVKGKGNTNKFIAAVKAALEKGDIAGAQALCDKQRGTVASVVSSALIKYSEVEKDDTLSKEQKIEAIKKQLEEAAALEMPSMQQNLPIVATMTTLGTLVGLLGTVLGMIKSFQALATAGAPDSVALSTGISEALVNTAFGIATGALAVISYNYFSNKIDNVTYAIDEVGFCIVNTFAATHKMDHVVKIKKGLDIQLEGIPSPKISNTPDSQLYAIIPDDFVGLTPKVIVKPGEKVLTGSPVIHDKTHPNIVVPSPVSGEIVTIERGERRKVIKITIKPDASQQALEFGRFDLENMDSSEIKDLLLKSGIFAFIKQRPYDIVANPDTAPRDIFVTAFDSAPLAPDYAFILKEEKQHFETGLKALNKLTSGKVYVGISQRQPIDVKNATSVIFDGPHPAGNVGIQINHIAPINKGDTVWTMSALDVLFIGRLFDKGIADFSRIVAVTGSEIDDPHYVRTRIGASIASITQGMVKAVEYEQRYISGNVLTGVKTNADGYIGATHSQITVIPEGNNYDEFLGWASLNPHKYSTSHSYFSWLLGKKKKYTIDARIRGGERAIIMSDEYDRVFPMDIYPEYLIKAILAFDIDKMENLGIYEVAPEDFALCEFVDTSKLELQKIVRDGLDRLMKEMNMKALKNYIDKIKPHFEPGGKLSMFQSVFEGFESFLFVPNTTSRSGVHIHDSIDSKRTMIVVIIALLPAMLFGMYNVGYQHYLSIGELARTSFWSIFFFGFLAVLPKIVVAYVVGLGIEFTAAQIRHHEIQEGFLVSGMLIPMIVPVDTPLWMIAVATAFAVIFAKEVFGGTGMNIFNIALVTRAFLFFAYPSKMSGDEVFIRTSDTFGLGAGQIVEGFSGATPLGQAATHSGGPLQLTDILGNPLFLNDMFLGFIPGSIGETSTLAILIGGAILLITGIASWRVMLSVFAGGIFMSYICNWFANPDIYPAAQLSPACQICLGGFAFAAVFMATDPVTGSRTNTGKYIFGFLVGVLAILIRVFNTGYPEGAMLAVLLMNAFAPLIDYFVVEANIRHRLKRAKNLTKMNKQGNTYTIIYTSVMVIAVAFILAFAAIGLKPAQERNIAIDKMSQILNSVNIASTPENAQELYGKYIDDSFIINSKGELAKGESFSINIADQLKLPENRQTLPVFIYTDNNESPKYIIPLSGSGLWGPIWGYISVENDGNTVYGAYFAHQGETPGLGAEIEKPQFQEQFQGKHFFIDGNFTSIAVEKTGQKPQNGADYVDAVSGGTITSKGVQTMLQKCVKPYAKFLESLNSKNIMLSKKNKEILLGPLSKNNPVIVQILGICSALAVTAKLEPALVMAVSVTAVVAFANVIISLLRNTIPNSIRIIVQLVVVAALVIIVDQILKAHMYQVSKQLSVFVGLIITNCILMGRLEAFALSHKPWESFLDGIGNGIGYGIILVIVAFFRELLGSGTLFGYPVIPQQLYDWGYQNNGLMILPPMALITVACIIWVHRSRNKDLQQMENLNLFVKSIFIDNMIFAYFLGMCSYLAVSKNVKTAFGLGIAVTFVLAITLPVNYLLETYVLKAGALKWLGAEYAQLDLSFLSLIMFIAIIASMVQLVEMFVEKYSPSLYASLGIFLPLIAVNCAILGGSLFMQQRNFPSVTSATVYGIGSGIGWMLAIVCLAAIREKLSYSNIPAPLRGIGITFIITGLMGIAFMSFLGIKLMTSTIISSIVLFLGVSILLVVILLVAKKYLVPSGKATITINNDKQIEVETGSSLLSTLSNEKIFLPSACGGGGSCAQCRCQVLEGGGEILPTEQVHFSRKQQLNHWRLGCQVKVKNDMKIIVPESVLGVKEWECEVISNKNVATFIKEFIVALPPGEHMNFIPGSYAQIKIPTYTMDYDKDIDKSLIGDEYLPSWEKFGLFGLKCKNTEPTIRAYSMANYPAEGDRIMLTVRIATPPFKPKPQVGFQDVMPGIASSYIFTLKPGDKVIMSGPYGDFHPIFDSKNEMMWIGGGAGMAPLRSQIMHMTKTLHTTDRKMSYFYGARALNEVFYLQNFLDLEKEFPNFSFHLALDRPDPAADAAGVKYTPGFVHQVIYNTYLKDHEAPEDIEYYMCGPGPMSKAVEKMLWDLGVPEENLMYDNFGGMFRRIVVYICSLLLFVFPAGAEGLSRERKAVKVSGDVLLAAMPVATVATVLAMKDWTGAKQGLFTGVTTLGVSYLLKFTVKKDRPDHSNRYSFPSAHTSLLFANAAFVQRRYGWKWGAPAYVLASYVGWSRVYGRKHDWWDVAAGAVIGAGCAYIYTRPFAQNHRLVISPLTDGNSFGVYASMTFMIVAGGLLGLSTFEWIAVILCIGAVLAAEGVNSAIEALCDKVSPEYDEAIKHTKDLAAGAVLILAVMSIIVGLLIFVPKILSLFYMILNLLFSIESHRYMYRLLSYLNTKIKQIYEFKIRFNKIGKQPIMKKGIHPDNYRPVVFKDMSNEEIFITRSTVAAKETIEIDGVTYPLVKLEITSSSHPFFTGKQKLVDTAGRVDKFMSRYGNRKKMSRKLKIRDLTLRDGQQSLFATRLTQEQINRVLPYYKDAGFFAMEVWGGAVPDSVMRYLNESPWTRLKTISEAIGGASYLTALSRGRNLFGYAPYPDTVLDGFYREAVANGLGIMRIFDALNDLNNVKSSVEKINAVGAISDGAVCYTVDPHYTITFMDRVKALFGKKLPKPIFTDEYFVEKALGFEKLGAKMVTLKDMAGLVNPSRIASLMPKLKQSLKVPVDFHTHCTPGYGLASSLMAVIHGVDILDTNIWYFGGGSAAPAIELLYIFCNKLGVEMEVNMAAVSKIRAELLGIRRELAAYDLKKDSFPIAFDPLIDKLPDHIDKLFDTAIEAARQNNEAALLDACHAIEDYFGFPKPNELVKAAEVPGGMYSNMVAQLKQLKAEHVLDDAMRLIPKVRSDAGLVPLVTPTSQIVGSQAVSCALDKLKGNPEYTTVSNQFKALVKGEYGKTPVPVDPKFREKITGSPIETPYDTNSYKAPENPVLPEYGNVKLAENEQEYLLLELFPNVATTYLKGVRAAEYEAKKPAVEEVKEAAEEAAPVEPITGPTIDAPMGGKVVEIKVKVGDKVKKDDVVLVYEAMKMENDILSTLEGTVKRILVKENDVVGTNEPLIEFEMIQKYAFSFDNKLKNIIFVFLNSCNVNRCNTYKIKWLCQENMFNFFKKKNNTPKLPYTTEVHCHVLPGIDDGSPDVEHSLALIHQMKEWGLERIIATPHVTEASFENTPQTIGSAYSRLCQETNLDELGIKLCYSAEYRMDDNFLGILQREEIIPMPGNHILIENSFLQPFWNIKSLVFDLQIKGLSPILAHPERYAYYYDDKKIYKELHEQGCEFQVNLLSLAGYYNKRAKEVAEWLISKQMVDYLGSDLHNSSHVLHINKYLSGKEYPKHMRNIHIKNNHLMFGVMIVMLSGILIGYILRNIRAIPALVSKINIYIIFLLLFVMGLSVGSNPQVIQGLGTLGLLGIAISVVSIAGSVFLSWIVYRHLFKKEDDQRSMKNSLIILLCFAAGVLCSYWGIIPECDDSLSLYILYVMMFLVGIGLGSDLTALSAPIKKYKFQILLIPLSTIVGTIAACCLFSLFCPVPLRETVAIGCGFGYYSLSAILLNELAGADIGTIALICNLSRELLTLLTIPLLARYCGKLAPITAAGATSIDTTLPLISATLGEKYVIFAIFHGIIVDISVPVLIWLLYLMKVGKLKKSIGDTSRIVRYMWYAFGGIVVLVVAAFAMIAWGWIGYMPPIEDMENPKDKFASEIYSSDMEVIGRFYQSKSNRVYVHYDEISPYLVNALIATEDIRFKDHSGIDVKALFRAFIKRGLLFQKSAGGGSTITQQLAKLLYSPNADNVVERLFQKPQEWVIAVQLERFYTKEEIVNMYLNHFDFLNNAVGIQSAAYIYFHTTPDKLKIEEAATLVGMCKNPSYYNPRRFNERTRGRRNTVLNQMYKAKYITKAELDSLQALPLELKYTRVDHKEGLAPYFREQLRLMMTAKKPVKSEYRGWEAQKFIDDSIAWANNPLYGWCEKNVKADGTKYNIYTDGLKIYTTLDAQMQRYAEEAVEKHLGGYLQPRFFAEKKGRSYAPFSRSITREERESILDRAMKQSDRYRAMKASGASDEQIRKAFITPVEMQVFSYQGSIDTIMSPLDSIRYQKSFLRVGFMSMDPNTGHVKAYVGGPDFTHFQYDMASVGRRQIGSTVKPFLYTLAMEEEFTPCDMFLNEQPTLITEDGKPWSPRNSSKARVGEMVSLRWGLANSNNWISARLMDKLSPSSLARLMHSFGIKNKIDEVISLCLGPVEVSVEEMVTAYTAFSNKGVRVDPLYVTRIEDNLGNVIAEFTPSMTEVFSEQAYYRILPMLKDVIDHGTGGRVRFRYGITAPMGGKTGTTNNNSDGWFMGFTPDLVSGVWVGGEDRSIHFDGMADGQGASMALPIYGLYMQKVYGDQSLGYSQDSDFEIPEEYSDPCSGSSYIEESVTAPVESIEGIFDMSEHLAFGLFLLSLLSEMSGQEQTYNPLRHRHFYKSQEIYSLEEKQNKKPIMKRESLVSITDFSKEEILDLLEKARRFEENPNRKILEGKVVATLFFEPSTRTRLSFETAVNRLGGKVIGFSDASTTSSSKGETLKDTIMMVSNYVDLIIMRHHLEGAARYASEISSVPVINAGDGANQHPSQTMLDLYSIYKTQGTLSNLNITMVGDLKYGRTVHSLLMAMSHFNPTFHFVAPDELKMPIEYKLFCEQNHIPYFEHTEFSEEVINQADILYMTRVQRERFTDLMEYEKVKNVYTLHNSMLEHSKANLRILHPLPRVNEISYDVDSNPKAYYFQQAKNGLFARQAIICKVLGIEVMNDEKKELKVAALENGTVIDHIPSSQLFKVVSILGLENCTNSITIGNNLASKKIGKKGIIKVADRFFKEEDLNKIALVAPAAQINIIRDYQVIEKRKVSLPDIVHGIIRCGNPKCITNNEPMETIFHVTDKIDVQVKCHYCERSVTKEEIEICMKQSWKPGTTIYPLPAVLVSCGNTPEEYNLITVSWVGTLCTNPPMCYISVRPERYSYEILRKNMEFVINLTTVQMAKVTDWCGVSSGKNYNKFEKTGLTPKTAQIVKAPYVEESPLCIECKVREIISLGSHDMFISDVVNILADDKYINPETGAFDMQKADLLVYSHGHYYEIGKEIGKFGWSVQKKKMKRITTVICMALLWILTVQAQIQELNVSKRFNWGIRLGVNAPLVDIRHLTLNGNKVDESDSESRLGLSGSFIGRYNFKKHYIQLEVGMHQFHTRLYNPDYELRKINTSAYTLDVPILYGYNITKHGPYLMNLFAGPRVSYIFNETSGISTTGGSFRNLIYDESPNSFSFYLIGGLSTTIGHLYIDFRYAYCVGNSKDLSFKVNPDELQTSQVKLSRAVNELSISIGYLWMKRDDIIFDIIEKENQRQRKGIELIASENFVSDQVMQAMGSCLTNKYAEGYPGKRYYGGCEVVDQSEQVAIDRIKKLFNAEWANVQPHSGAQANMAVFMAVLNPGDKFLGLNLSHGGHLSHGSPVNFSGLMFHPLEYSVKEDTGYVDYDMMEEVALRERPKLIIGGASAYSREWDYARMRKIADEIGAIFMVDMAHPAGLIAAGLLDNPLKYAHIVTSTTHKTLRGPRGGIILMGKDFENPWGKKTPKGEIKKMSALLDSAVFPGVQGGPLEHVIAAKAVSFGEALQPEYIEYQTQVKKNAAAMAKAFMDKGYKIISNGTDNHCMLIDLRTKFPELTGKVAEKALVQADITVNKNMVPFDSRSPFQTSGIRVGTPAITTRGAKEEMMCEIVELIDTVLANPESEAVIKAVREKVNGMMKEYPIFAYMECSYFILNTMKLLSKLSLPFIFFTAILTLECAAQDWPNLNRYRDANKAIMEMRKNDSEDARKNWVVFMGNSITQNWASLDPQFFSENDYIGRGISGQTSSQMLLRFRQDVIHLVPKAVVILAGTNDIAGNTGPTNIDMIMDNIKSMTELAQANHIKVVLCSVLPANRYGWSPEVQPADTIIALNELIKDYARSKRLVYVDFYTALVDEQKGLNPNYGRDSVHPNLDGYKVMEPLVVKGIKRALSRPMEHRNLIAALCMISAFILPINAELKYVDASRLTLIGKVMPTPENVYHRVDTVKYNDMPFQVKRLFTHSAGLVVSFKTNSPTVAARWTTKGKGVMGNVTPICDRGLDLYMNDGGKWIPVGAGTPSAGKAEQERVITKNLKPGVHRFLLYLPLFEEVRSLEIGVDEGSFIEAEPSPFRHTVLMYGSSILHGACASRSGLAYPARMSRNTGINFVNYGLSGNGKMEAAVADMLKDIDADAFILDCMPNPSPKEITERTQYLVNTIRKYHQGTPIIMIETYMRENGYSDQAVHDRCTRQGEAFVKQYELLKKQGIKDLYLIRDNHAIGTDHEGSVDGTHPNDLGFDRMVEQYQPQIMRILKKYGIKMSTLADVVLPLPLYKYFTYRIPSDLQEALQIGSRVVVPFGRKKYYTAIVVRLHDVMPQGYEVKELISVLDERPVLRRPQLQFWEWIADYYLCSVGDVYKAALPSGLKLESETTVTLNTDFEEPDDNRLKEREWMLLAALGKKSRMTVQELEKESGMRNILPTLRVLLEREAVFVSEQLKTNYRPKTETYIRLTFQQGDDAALRHAFECVKQAKKQETMLLSFLDLSLFMQKGKLREVSRKSLLDRSGMSSAVLGAMVEKGLFEPYKKEISRFEAEVYTVQEAAPLSDAQQVAYRQISDSFKEHSVTLLHGVTSSGKTEIYAHLIDRVLHEGRQVLYLVPEIALTTQLTNRLRKIFGDKLMIYHSKFSDNERVEIWNTLLDDHSPRIVLGVRSSIFLPFGDLGLVIVDEEHETSYKQYDPAPRYHARNAAIVLASMHGAKTLLGTATPAVETYFNARQGKYGLVELKSRFNDVELPEIIPVDVREMRKKNRMRGNFTPELLNRMQIALDGDEQVILFQNRRGFAPMVECKQCAWVPKCEHCDVSLTYHKRFNQLTCHYCGFTYEIPKVCPACGQPTIGVMGFGTERIEEDIAQHFPNIPVSRMDLDTTRSRSAYEQIIEDFSKKKNKILIGTQMITKGLDFDHVSVVGILSADLMMNYPDFRAHERAFQMMEQVSGRAGRKNRKGVVVLQTSQPESPLIRQVIAHDYEGMYNMQLSERKAFSYPPYTRLIYIYLKHRDETLLQELSVRYTSLLREVFGARVLGPDNPPVARIQSLYIRKVVLKMELSASMPKVKEILKQVYENMLVDDRFKTLLLYYDVDPMMLSKDFYTPPLRFATQNIEEVARSDGGVKKYPQQRKRIKVSTLSHDVPMKNRVILLSLVTWLCQISVWAQLEVDSLGRTIIHKELKLFGEEGSLRQSLFGKEGDFYWSDGFGGLKMTSLGKFFLEAAEAGSNIFNTEVDYGFDPPYESIYPQHYDAALTVRSGGSRSIHSIYTGAEGGTHEGIRSDVYKNADRPFAAYIMTTTPDSYRTSMQVFSVDGNGLVYGLSGFTQASDGRLKQDVKEIASGMDRISALRGVSFRYKPGGERPVSAVANENGHAGYASSDIKRQIEAENARERIGFIAQEVESVVPEVVRTLPDGTKTVMYTDLIPLLVEGMKEMQATIERQEERIAELEESLSGDNVPEKVVPKNARDSEDSEIESSTGEAAIYQNVPNPFFQTTEIIYRLSTNARSASICICDLTGKQLKSYTLQPDMPTGKIVIPASDLTAGMYLYALVIDGTLVDSKRMIVEMMKFVKYDIKKIEILLMLLFVAFQSRAYDFEKDGIYYNFNGTIPFEVFVTYRDNPFDVGYQPSYSGVVVIPETVEFANKYYRITEIGDFAFRGCSSLSSIEIPGSCTTIGSGAFGGCEGLTEIILPESLSYIGSSAFSGCTSLMTVNIPIGIKYIGGSAFGGTPWYNNQPNGEIYFNTIFYAYKGKMPPQTHIDIRDGTTQISDGAFRYCSELASVTIPGSVDKIGVYAFKDCVGLTSVEIGYGVKIIENEAFDRCINLTSISLPESLTTIGRGVFMRCESLVSLSIPKSVKNIGFRAFDGTPWYNNQPDGVMYINDILYTYKGEMPSDTHIDIRKGTVAISSDAFARSSNRMTSLTIPKSVTSIGEWAFAHCYDLKSVTIPGSVVEIGANAFYSGGLTSITIEDGVTIIGSEAFMYCKLLTSMDIPTSVKKIGTNAFLFTPWYSAQPDGLIYINDILCDYKGLAPYDTHLKVRDGTVSISTATFLDLENIVSVMLPGSVSSIGQEAFSGCTGLTEITCKAAVPPICETDCFLGIGQRDCKLYVAEGSVEAYRNAPVWQNFDIIATDFSGIEEISAEGSVRIYASGGSIVLENLSPGMPVAVYDTTGHKVKTVEATGSRMEVVLPAGFYVVECAGKVEKVMLRALSGRIMKSKNIIIVLLSFIGGVYVQADNLFERNPHWRLEDMEAHWKGRWYDVGDPEEVNGKIYFKLFYMLDQCESHGLQRQTDFYRPDTLLRKIREENGRILVDYEDYKNYCTKAYVDYIPYKKTDGGELVLYDFNMKVGNKYGHVEGYDDVWVSEIRKIAFDDGKIRKLFILSNGLKIVEGIGCLCSEGDPLLRYLNPNQWERGVDKYLGLFEENETQIFSQTREEALSDTSLERYLVYHDFWNKGLYYSISFTSDSEVKVACYSNPNPTGTYWGTVAIPESVEHEGDTYRVTGIDDYAFGNSPLLYSITLPGSVSSIGQEAFSGCTGLTEITCKAAVPPVCDADCFSGVEQRDCKLYVPEGSVEAYRNAPVWQDFDIIATDFSGIEEIRVDEELDEPQSPLYDLQGRRVTGTPERGLYIRNGKKVWIKMMIDGREAIEKSKTMKRTIFYLFCIWGLTVSSAVAQKRTVSHETGAFVGESSAERPERRVSVSPDGVTVTYEFKHAVVLSDPDVADHYLWRISGFGHSVVPGEPDVPVRWDSFALPEGCASFTVSVLESACVDVPLRLSPARAPQPEGKESPAVVPDIAPYEGWFPREVVETGEVRVYRGRSVAEVGVYPVRYDWKNGVVRACSKIVYRVTFGEGSLRSAPEGRIAPDDSFLDNTTLNGNVGAAGYEMFRSAGDTGSAGKDYLILSTPEFEEAVRRLADWKRTLGFGVHTRLRGDWTPEHIKSAVKEVYRSAPSLYYLLIVGDHDDVPAEDMARTIVNQDDGNSYQYVTDYYYGCMDGEDDVLVDLYRGRLPVSTATEAMTVVDKIIRYERNPVRDTAFYDTGLHCAYFEDCTPYGWNGPGDGIEDKRFTLTSEEVRNYMLSKGKAVNRVYFAYDYRETDDYPPPTFWNNGEFAWGDSIPVELQRPYFAWDGDSADIVRYIDEGAFYVLYRGHGTDSTWVQPYFTGDNILSLANGDRLPVIFSINCETGSFQEDDCFAEAFLQKRNGGAIAVYAATEKSWPGYNDAMVIGMFDAIWPDPGVDSKLYNFLHMTTSPSRLWETTRLGEILDQGLRRMEETWGAYRGHIYTQFSKEIFHCFGDPGMRIYTDTPTEFEKFSVTRDSLGVRVDLGSEAGDIAFYDERTEEIRFYTGRSAEYSGDARYVRVCVSGQNKVPAIDFPVYPDVLYIQNETVQGPKYYKADTIKVGSHVTDEKAKGEAVFDKGEVTLTGREKVILDRGTTVKRGTTFKIQIKKMVLLFLFSVCVTSLYTLRCNPRKAGHGKGEGLEDSGCLRLKSVFLIVMGSAGNQWGNVDMDFSDEFLVNNHIPVFSERLIYSSVIVIGGAFPPVFLTPSPYGHYSPYLICDEQRERVKASLMKFMKKTVFCVALVAALFLAVPANAQFKFGPKVGMNISTLSLSGNLSDNFKANNISSFTGGLMAEFMVPVIGIGVDASLMYTRKGSELKDITSGISENKHVDYVEIPINLKYKFSLPVVGSILSPFVYAGPSFAFRVGDNFKEQFKEKSFDTAINVGLGLELFNHLQIAGQYGWGLGSAMEVKNDLPDSVMKGKSRAWTITAAYLFMENKPTIEEEIVKMLRTVYDPEIPVNIYDLGLIYNIEVSDGTVKIEMTLTAPNCPAADFIIEDVRMKVESIENVKNVDIQLVFEPEWDKDMMSEEAKLELGLLMPGKKIYFASDFHLGARYIENPIEYERRIVRWLDSIKQDAGTLYLLGDILDYWYEYRYVVPKGFTRFFGKLAELSDNGIDIHWFIGNHDIWIFDYLPHELGITIHDGTLITEIGGKRFFLSHGDNVGKRPMTFRFLRKIFRNRFCQYLYAAIHPRWTIAFALRWSAHSRKAGDDYAEYQGEKNEHLVCFAKEFRETGKIDFFIFGHRHILLDLALPHQSRIIILGDWIKHPSYAVFDETGLNLFDYIEEMYEVAINCVDIKTKKNFFSKALFYRFSIGINFFKVKKIVLGYMKKSYTFTWIGIVICLLGLSPVSYAQAIEITDSTPFFEDFNEISSSEENFGLSGWTLKSGYATGSTATKWSVNTSSSNACDGYSLKADDARATSTAILVTPKLSFASGRTAKISFFMNRDTGTRQPNEGFKIYVNSIGDIYSYDDDNKVIINGDQTVTTLSEPILHAKRYAGTEITKTGMYEMSVNIPSEMAGQEFYIIFEAIQEYGNANYIDNIKIELISEQPKLINETKNIDLGMVKAGESASQEFILSNEEINTLNATLSVENGESSPFSVTPTTTDIAFNEQKTITVNFSSAEVNSFTGKLYIDSNGGKDTITLSAETYPATAYYETFDELSKLPDEWVVVKNGNETTYSINSSKGVNGSKCLSGSIGSWGDESTIDTIFTPVISGKVTFDFKKAGGSSDAIQAYIVTADGTQTAINTGTGSSSSWTTVNVDDVPEGSRIAFTLNNVYVDNFIAFTRQEISKGIQLVKEANNRPSSWMTLYAGPDKATQNTLQFAVKNIGTQTVSANSYNFTTQLVNENNTVAEGVSYKTYIINGEDTTLYEDNVIPGPEIAAGAGTTIKGYLFISSNDEKSKLSLNVKVNNVENTHFTQVKTGDNITIKPNKGDASLSAINFGLVNKATTLDYVIKNNSNNGALTVSKITVPSGSAFSVNAALPLVIPSSKSDTIQITFNAEPGIYNDNITVEHDGIGNTEFTASGTMLSATALLESFEGETFPPILWDMKQGLWERNTTTKHHGETSIVNTESTVDTIITPLLHLSAGDSIAFSVRATSSSGYNTDILYSADGKTWNLLKSFAIYGDYWSDWTEMAAYMPEDFTEGDYYIGFASKKTYIDLVYGPQIVYQEHRIDIKGFTGENKGMVNYTQNFTIDVACLGTAGETAESYSIALMNGEENIGNYTVEPMILGDMKSYTCSWTPRAAGEASIYALLTLDDVVTSTDTITVSVAEESLISTVMIGDLSTTAPSPNYKHYLYETLYTPEDLVGLQAGDVIETVNIPYYATDAAVKGYRINIWIGNTEKTALTTDKMSEADITGLSHIGANLRYEAGGSKESPLYFEMRPETPITYNGGNLSLIVSVDSTSYKSGVYFFTQKTSTKSMKTYSIDGNTSADYMDTWINGGYIPKVAENIMVMELGLATEAPVVHGIVTRKDNQAPIEGATVTMQSGEVIYTATTDETGAYSISVMQPGKEYEMTVSKDNYTGVDGVLVTVNEDTEQNFELTIISGIDHTTENATKIFTDRTGNIHVVADAVIETIKVYSTSGSLCITETPASESAVINAGDLKGIYVVEVQTAGSVKRAKVRLMKRYAIIVAGGKGTRMGNDIPKQFIEIAGKPILAHTIENFYRFDPNIDLIIVLPQNQQEYWKRLCAVHRITIPHLVVKGGETRFHSVLNGLSLIPDEGIVAIHDGVRPLTAHRVIENCFHVAEEKGGAIPVLPLTDSLRQIFPDKSSKAVDRTAFVAVQTPQTFRVEEIKKAYKLPYNDTFTDDASVYEAAGYIPELVEGNRENLKITLPVDLAIAEIGLKEMTDLAGLNIKYLPGVGPKRAELLNKELEIFTYLDLLHYYPYKYIDRSKTYKINEIDGSMPYIQLRGKIVSYTTHGEGARRRLTALFSDGSGVIELVWFKGIRYITDRYKPGTEYTLFGKPTLFNGKFNIAHPELDPIDDRIDNTTGLQGYYTTTEKMKNAFLNSKAIQKMVYTLLSGIQNPLPETLPLPIISRMQLMSSTDALRNIHFPVTIGHLRRAEFRLKFEELFYLQLHILRYTRLRNLKLGGFRFDHIGNYFNDFYHQVLPFELTQAQKRVIKEIRADMGSGRQMNRLLQGDVGSGKTLVALMSMLIAVDNGYQACLMAPTEILATQHYEGLKKMVEPLGLRIELLTGSVSKKRRAPILEGLLTGEINLLIGTHALLEDSVNFANLGFVVIDEQHRFGVEQRARLWRKNKIPPHILVMTATPIPRTLAMTVYGDLDVSVIDQLPPGRKPIQTLLQYDNKRAQLYASLRKQLQIGRQAYIVYPLIQESEKSDLKNLEEGYEHIREIFPEYQVCMVHGKMKAAEKETEMQKFVSGEARIMVATTVIEVGVNVPNASVMIIENAERFGLAQLHQLRGRVGRGAEQSYCILMTSYKINQDTRKRLEIMAETNDGFRIAEADMQMRGPGDMEGTQQSGIAFNLQIANLAKDAQILQVARDEAGKLLDSDELLERPENQIVRKELNRIFEKQKNWGLISMYFGKTKHYILPLLLAFSLGNLNAQHNRNLSTHLHSKQHQDLIAGQQNIHKEINLVDSIALLEMLEEEEEEFPGIDIYGENWDQTWVNPYKVPIDKLPESATIDVSEYCMPIIGHVTSNYGWRRRRMHRGVDLSLHIGDTIRAAFSGKVRLTRYERRGYGYYVIIRHGNGLETIYGHLSKFLVKPDQIVKVGEPIALGGNTGRSTGPHLHFETRYLGMDINPNKIFDFVNQVPHTDQYTFNPKELASSLGYGRYKGSNNGAKYVSYRVRKGDSLSRIANKYGVSISHLCKLNGIKRNGVLREGKILRIKMETQEQILKEQRLRIEVLRHQLLLRYYELLLSLDVLTQAAEVKTLMGYINTLERYAKRFENKPSKKEAGKKRRKNTADETTADDIHPEASISLSEHAKELFDMMALDDNLPSEENELPADIDDFLKAGYARFLEQQKLRAHKNTPHIEDNSSRMGRIVLCGLIVLQRYLNKYVFRTPYLNFLLSPVKSYKSLDKDFSMNLNEIIANIVIPAAIAGILTPIIMKGILKTSWGQKIFKHKDNASEPMVSRLRCFIGGILFCFFTSSFALHATENDDLVKAMMEVYAEELAANPQDYRTYYSRAMAYFGQGDMKKALSDIDNAIKYFPRKEKDDLAQAYLLRAKILSERGETKSALTDLNSALRLVPNHRLALKDRGDLLCRLGQYDMAKIDYNHLLRMDTRSQSAFMGLARVEAHTGQPVRAKDLLAQAVNLSPKDPKIYLERSEIYKEMDMMPEAVDDLVYAVSLDDGHSGAIQKLVAYSNESYNGVIEGLNRNIERSPRQGMLYYVRATIYKDHYDYASSLRDWNTIVEENFFNFHTVYYNRAFCLSRLTRFDEARADIKRAIEKDSQNAEYYRLLSEIERGDGNLVAAEQAVRQAAVYDPSNVAICLERGMIAYDEGDFGQAISCYNEAVVAAPDEPYSYLARAYTQEYGMENRIAAEADYRKVLSLDGTSAAYGDNLKGIAFAKLHLKKQAEEWERSLLASGSVRNIDYFYLACMYAGFDVDKSISYLDKALQNGYGDYYRIHVDRYSPVSLLPIRHLSQYSDLLYKYRALFGKMKLENLKYTDSGNFFLLAGPCVIEGEYMAMDIAEKIVGITESLQIPYIFKGSYRKANRSRLDSFTGIGDEKALKILRKVADTYKIPVVTDIHTAEEAKMAAEYVDVLQIPAFLCRQTDLLVAAAKTGRVVNIKKGQFLSPEAMKFAAQKVVDAGNNDVMITERGTSFGYQDLLVDYRGIPIMQKFGFPVILDATHSLQRPNQDSGVTGGMPELIETIARAGIAVGVDGLFMETHPEPCKAKSDGANMLPLDLLEGLLTRLVCIRQAVMSLGSKDKMQIFYAPDIESVHELPEAESQHCVRVLRMGEGDEIGIVDGGGNKYLAEIVLAHPKRCGIRILKKSKVPNPWRAQVHVAIAPTKNLDRMEWFAEKVTEIGIDSIALLKCRFSERKELKLDRLNKILISAMKQSLKAVLPRLSEMEAFSDFVARPFDGQKFIAHCYAEGERKELSEVYRPGENALILIGPEGDFSPEEVEQAIACGFQPVMLGQSRLRTETAGVVACHTIQVLNQLKSKMNFLQFFIWGSWLCTLGLYMTTPVEDGGLAFDGALVGSVFALSGIASLIMPALIGVVSDKWVNAERLMGVLHWVGAISLFCAAFVTDYDLFKIAMLVNMLAYMPTLSLSYTVAYNAIDKAGLDRIKDYPPVRVWGTIGFIVAMWIDNLTGFSSNNGQLIMAACASAAMGLYCFTLPACPPAKAMKNNGLMSVLGLDALVLFKNYRTAVFLLFSFLLGAALQVTNMYGVPFLDSFKATHPEAWAVKYSVILSSLSQVSETLFILAIPFFMSRYGIKRVMIISFMAWVLRFGFFAIGGPEGFPVVFLVLSMIVYGMAFDFFNVSGSLFIADEAPASIKASAQGIFMMMTNGLGSIVGGYGAGLVIAYHSENGVVTDWPACWTIFAAYACVIGILFALTFHYKHQAKVKAEKVMDTRIKLKVLGLTYSQVQKGAYALVLAEENGPRRIPVVIGVSEAQSIAISLEGIVPPRPITHDLFVSFSHGFGIRLKEVCIYKFENGVFSSEMLFDDGTREIRIDARTSDAIAIALRTRSDIYVMQDIIDEAGFVYEENEGKEVVETEELPEEKSLSNCSRKELKERLEKAIASEAYEEAARIQDELNKRDNNLMNVAVLLSGGVDSAVVVHRLKEQGIDPTLFYIRIGMDNDEGDCSAEEDIEMCTYIARKYGLPFEVVSLHREYWDHVMEYALRTVKLGLTPNPDMMCNKMIKFGFFEERWGHAFDKTATGHYATTTERNGKIYLSTARDKKKDQTDFLAQIDSVQVSHLLFPIGDLLKQEVREMAVSAKLPNASRRDSQGICFLGNIDYNAFIRRHLGERQGAIVELETGKILGSHKGYWFHTIGQRKGLGLSGGPWYVVAKDVDTNTIFVSNGYGTEKQYGKVLKLAEFHFITDDPWGEMESPVEITFKNRHTPDFTSGLLIKEGKSYSISSTEPVQGIAPGQFAVVYDKECHICVGSGVITLMKNFAKTVSRFLLCERLSDWAKLGLRVFIGFMMLTHGIAKIEQFDTLKSTFPATMGMSSKLSLILIILVEVGCSSLVLLGFMTRLAVLPLMFSMIIAAFFTFSPISLSTAELPMLYLGIYTFILLAGPGRYSADAFFVKTFHLETSSESMEEVMGNFMVRKILLCIFACTFVMSEAQEESVRPYQLPDIPDSLVTPDVRSEYLIAHYWDNFDIENRAYLDAREIPEQAFVDFTSIMRIASRESTLKSIDILLKRASSDEDILLMYADIADKYLYSGEGHLVSEEAYLPFVKAVLDSKKVDKLRKLRYSYQYDVLTKNQLGMELTDFEYKLPGKEKKFRVKKLKAPFVLLYINDPECDDCSLTTLRLSVSQSLLKEVREGRLVILSVYPDGETDEWLGSVEKYPKEWVVASMENGDRYFDLRIMPALYLVDKDKKIILRNTSLEEVEKILKENKMGNNPVKFSYKQIWFIAYPILISLVMEQLIGMTDTAFMGRVGEVELGASAIAGVYYMTFYMIAFGFSLGAQIIMGRRNGEGNYAKIGPIFYKGTYFLLGVALVLFVSSHFVSPLILERFIDSPHVHEAAVSYIRWRVYGFFFSFVAVMFRAFFVGTTQTKTLTLNSIVMVLSNVVFNYILVFGKLGFPAMGIAGAAIGSSLAELVSVIFFVVYTRVRVDVKKYGLNRFGLRNGEPLGNILNISVWTMVQNFISMSTWFLFFIAVEHLGERSLAITNIIRNVSALPFMIVITFSSTCSTLISNLIGAGNTRYVRGTLNQCIRMAYLFVLPIILFFILCPNWILRIYTDMPDLISASLPSLFVLCSAYIFIVPGNVYFQSVSGTGNTRAAFILELMALVLYVVYVAIMIFYLRVDVAICWTTEHIYAIGILLFSAAYMKWGKWENKKIMKTIESEEIMLQVGSALVSLDVIERFFICDLEKCLGACCIEGDAGAPVSEEECRKLKEILPVIWDDLLPEAKAVIERQGVAYVDEEGDLVTSIVNGKDCVFTCYGKNGMCQCAVEKAFREGKIDFYKPVSCHLYPVRLKEYKDFAAVNYHRWKICKAAEVLGRREKVRVYEFLKEPLIRRFGEKWYNDLCEAAEAYLKEYGKMSKKALLMILDGWGIGNHSHADVIYNTPTPYWDYLLKTYPHSQLQASGENVGLPDGQMGNSEVGHLNIGAGRIVYQDLVKINKACADNSILQNKEIVSAFSYARDNGKNIHFMGLTSNGGVHSSLDHLFKLCDIAKEYGLENTFIHCFMDGRDTDPRSGKGFIEELEAHCAKSAGKIASIIGRYYAMDRDKRWERVKEAYDLLVNGIGRKSDNMVQAMQESYDADVTDEFIKPIVNTTCDGRIKEGDVVIFFNYRNDRAKELTIVLTQQDMPEAGMHTIPGLQYYCMTPYDASFKGVHILFDKENVHNTLGEYLSKSHKTQLHIAETEKYAHVTFFFNGGRETPFEEEDRILVPSPKVATYDLKPEMSAYEVKDKLVAAIGENKYDFIVVNYANGDMVGHTGVYSAIEKAVVAIDACVRDTVEAAKANGYEVIIIADHGNADNAENADGTPNTAHSLNPVPFVYVTENKNARVEDGILADVAPSICHIMGLPQPAEMTGHDLLKMRFPFVSVLTFRYLCPAIWQGMPGESKDVGVESFSSESSALFLSVDIMKKVVVLLILSMLYMSPTFGYPPEYPYYQSDNIMYYVFESEKTANVVTYYMEFRVGWRPFIYRDAVTIPETITYNRQVFRVTSFSSSYPDYYSCVSKITSLELPNTLSSLGSLAYSRIKSIDLPEALLGISDYGFYGCYSLRDLVIPDKVKTIGNYAFANCIGLTHVHLGKSVETIGENVFLNSDSLTSITVDEENPYFMVEDGVLYSKDKRELLYCPKNFSGIYRVAEEVKRIGKSAFRNCNQLTEIVLPEGLEVIGDTAFYGCTQLKQISLPKSVSQIGAYAYKGCPLQGTLDLMNIKDIGEGAFEGCTGLTSVVLPENLLRIEASLFQGCTGLTVVNIPQCVTTIGTSAFASCSRLQSVSIPDEVERIEDYAFKGCSNMKHLAIGNSVKKIGVEAFGECRRLKSLSIPASVDSILSSFVDCDSVSSLELKDGNRPILIEGKCFNGGNMMIDTLYIGRKISGVPQFNECAYLSTLTVGSMILTMQDVSGCKNLSKVICLGATPPEATMTTFSTVTLDGTLVVPASAEEVYRRTAPWRFFYTIETFPDVAPTKLILDTESYQITREDEALSLLATVYPEHATFSGLRWTSSNEMVATVSETGIVHSNKEGEADITVSLNDGALTATCHVSVHYVDAVEEHEADQVSIYPNPVDDMLHIEGVTTGTSITLYDMTGRLVLSDRAYGGAMTFDMSALKRGVYLCRIQNKTYKIVKRMFCKSKKNLFFTIIGSHFFQKYFILYHHAIKSLLPDSTFAVYMTANEILADIENYEKFDPVKGTVEGKTYVVVPTTTETGKNSDVVINGHITLAHNTTLIFAGGKISGTGTLTGDNTRLIAPITQIFGEDITVDGIWVMDRAYPQWFGARNDISNNEFWHLRVACEAAKSTEENPLTPAAEKDNIEEARNAALKNLKAWKVDSSDAINKAMKLKHAGEVFLPKGEYAICKTLKVPYGIVLRGELADYRLNSSNIQLPIGDYPLGGDTTPDDLSSYYKLGTVIRPLNTNYPLTVDSDGTPITSFDNNFAVVINPNIHPNENHNEAWEQEFPSAFTTIRDIQFINFWTETPSMRGIYAIGGMKIENVSWSQFVQAVATPDDMYCDGKTIINCQFNAPTGCIFYGSIFHKLIIQTETEKIEKIIKRFVIDKKEYYAFDLSGLGDNLYFHHNHLGMGEITGGLKLRSSNGAQISCNIINDNIAFYNCKGISFSANHCEDGIQVKISNSQIDFSGNYFHKGKKPTFLIRDDYARGSINVQSSTIALQNNSLVFLDHEDESSKLYIGNISPYDIQTDGYLSLSIQNTYRYRTPRNAGGNIHPCGITILKEIWTEGVAEPELIPFTEFNDLSYLLSGNSLIKPNFHIVHNHVVNNTQFFRGAAMANNNIVWFLEKGAYHYRMQTIWDKKRLIGSSTLTLGNFNLGEIGSNTNTGKPQGLLLNIGTNSYDGPSDGNGNQVVIRLMRARTNGNTAYHSIEIPVCGTRFLYDNGLSVCGFKWKQEPSIAPLTVNTMIQSIHFVGDNVVCKGTACPTVGEWTVGDIVYNTGAASNNAMWIYTANGWQARMDLVKIAEEAFACGKEHPEFRSGDTVTVSYRIKEGNKERIQQFRGDVIRISGHGNKKRFTVRKMSGNVGVERIFPIESPFIEEIVVNRRGKVRRAKLYYLRALTGKKARIKERRVMIRKLIGITAIYLSVSLCGLAQTERIVILHTNDTHSQMEPFAATHKTYGGLGGVMRRMAIIDSIRNAEPNVLLVDAGDAIQGTPYFNLFKGDAEFEAMNAMRYDIRTIGNHEFDAGMTKLAQLIKNSTADFISSNYDVSHTPLHGTLQPWVIKKVGKYKIGFLALNVNPDNLIPSESCKGVIFHDPIQAANETAALLKQKGADIVVAVSHLGYTVQDKKDVTDPQIAAASSDIDIIIGGHSHTVINPDSIDNNPLSTLQYQVKNKDGKNVLITQTGMSGAYLGCITIEPRNMKKLNTYCSIGCLSVVLSILSSCSTSRQEFDISYKLIPVDARWDKTPEPLMEQIVDKYKTSVDSIMSIVIGKSSQYMAPGRPETSLTNLSADIIKTEVQRDFGQPVDFAIINTGGIRNPLMQGDITLGEIYSIFPFDNTLCLIKLKGSDVRELLNIVASRNGEAVSKDVHMTIADEKAIEPTVNGRPIDDDRIYSIATIDYVANGGDHMTPFLNAIERKNSNTFMRDAVINFIERENREGHTIAPPKGGRIISSNNKMKKIIACIGTFFALVALSTQAKNPYLLQTADQSAMEHWVDSVFESLSPKERIAQLLVITVRNSDTPQNRKTLQRLIQGQKIGGLLFDSGTAKDQANLTNYCQSLSKVPLMITLDGEWGLAMRLSDTPRFPVNMMLGAVQNDSLLYEYGRAVGKQCRRMGIHVNFAPVLDINSNPRNPVIGKRSFGESLKNVSSKAIAYAKGLESVGVMAVAKHFPGHGDTSEDSHKTLPLVPHSKERLMSTEIPPFKAYIDSGLSGIMVGHLNIPAWDATNTPSSLSPIITRELLCDSLNFEGLIFTDALKMKGASKFGNTALQAILAGNDIALNPSKPEEQLNSILSAIEQGKITQQAIDEKCKKVLRYKYVFGLANYTPIKTKNLIEDLNAPEYDALNRKLNSEAMTLLRNSQNLIPITHLNKGRIAVVSVGNDTESVFQKTITLYADNVGRFDDSNPLPSLLDTLKHYDKIILAVHSGNAEHRARIGRICQTGKAIVACFLSPYQMNRLSHELTHCKTLLLAYENTSLAQEYAAQALFGGYAIKGKLPVSLEGSFKLEEGIYIPKCRLGYAIPESVDMDSRILSAVDSIIAQGIKEEAFPGCQLLVARQGTVVWNKAYGYFDYETHRHAVATNDLYDLASVSKATGTLPAIMKAYDNGRIDLNKPMSKYFAPLRNTDKKSLTIKEALLHETGMPASLQMTSVIIDPNSFTKPLIKRRKSSIYSIQIGNNTFANRNAQLRKDLLSSRKSDRFPMRIAQNLYGSKSLPDTLINRIIECKLRPSKRYLYSCLNFVLLKETVESATGIAMDKYLQQNIYGPLGMQTTGYRPLDRFPTERIAPTECDNFYRKQQLIGYVHDETACFFGGVQGNAGLFSNANDLAKLCQMWLNKGTYGNERILSPKTVELFLTEKSSTSRRGLGFDKPDMDNPEKSPTAIEASASTIGHLGFTGTCFWIDPGQELIYIFLCNRVYPSRTHGALSQLNIRPELFSTIYRSIKNHSKMCVKYNSCGTIYRLFFRLINSYRTMNRGSDIQGKVLHGFTVRRYVGRLYVFVACIALLWPVCVCAQPRKVQNLPYVDHKLLHLGFSIGTHVQDMKFVHSGFVTDGGESWYMDIPDFSPGFNVNLMADLYLCPHLNLRFSPGIFFGNKVVKFRETATQEYRTQDIKSNYIVVPLELKFSALRCNNFRPYLIGGVMGTADVSKKRNDLLKLNTFDGYLTIGLGCDFYLPYFKLIPELKFCFGLTDVINRKRNDLRDPADIKFTQSLKKATSNMVILSFYFEMAYVINDNCVACGSCISECPVEAISEGDIYKIDADKCLSCGTCAEVCPNDAIHEAMAHKKGVGSSKNGRESESKRLGIKIFGGQYAKAGNILVRQRGTVHHPGENVGIGKDHTLFALVNGTVVFRKCKENRSYVSVKPADNNMYVIVEIQGQQFKVENGKKLFVHYLGAEHGAVLEFDKVLLVDKDGAVTVGTPTVEGAKVVCEVVSNDGFGKKGLVKGERILVFKKKRRKGYRRLNGHRQYFTEVLVKEIVAMNKHIITEISPLSEKDCLFIVERYKTEFTYPLHNHKEYELNFVENGAGVRRIVGDSVEEIGDYDLVLLCGDNLEHVWEQGNCQSKQIREITIQFSPDLFSNNFIDKKQFTSIRKMLDRAQKGLSFPLHAVMKVYSTIDSLLKGEPGFYQFVKFLTILYELSICDDARTLSSSSFARSKTASDSRRVQKVEEYINLHYTEEIRLSQLAELTDMTPVSFSRFFKLRTGKSLSDYIIDIRLGHATRQLVDSTKTVAEICYECGFNNLSNFNRIFKKKKGCSPKEFREIYYKKKIFVMKKLCVFCVLCLVCLCELRAGDTVRVSIWDRLWEHRSVVASFVELSYRNPAVRYDRYSSSLTRATVGGQYTSESEPVLLQSGNGEKSIGFQADSYIRKKNYCLWGNALYRNGRVKNLKWNETSDWELLYPYLLADSVGGDLSKEIYSFTGGYAARYESITWGGNFSYEASVAYRGIDPRPKNTTSDLSLSLGLSIPVSPSYLFDISVSGRKYKQTNGIKFYSELGVSKVYHLTGLGMHYNRFAGNNYSTYYNGYEWGGSLGVHTSRSIGFVGNVAYRYFSCEKIISSLNELPMARIGRHTFAGEWLYRKSLSGIESWGIKLTGNYELKLGTENIFGDAANQIYPKIGEAEQYSSHAYRLTLSGFYEAVRRKGWNYSVQPRVNYGRVKAEYVYPLRKMSVREVTPEVALSVSRMSKDWFLRLEIGGNYAMIFDSRLFHTPSSIDDAALLSAWCYNYKNLSSDYVGYYAVFTCSRQVGKKYLLQLDLKGGQYRYNTDIVATDVCAGLSFLFMKYMNRITLCVSLCMLALFCSCDEERDIRWTTVEIVVRYPSDLSGISVESETFEFRNITSGMVTSFTTRKGITLPEGLYDCSYEAAITYQTADSTIHTSLSGYARSLELMGAQGSVSIGSYQVENKDDFIIEEIFFTGTLQSSGKQYYGDGYVKIYNNTDHMLYADGVALMESKFVTTQKFDYTPDIMSTHMTVQAVYVIPGSGTDHPVAPGESFILCDTGIDHRIANPNSFDLSRADYEWYDESSVPAHLDIDSPTVPNLDKWYCYTKSFWVLHNRGFRGFAIARIPIEKEKFLTENLYTYSYVMVLPAGTFPMEQTAYKVPNEWIIDAVNTSVQSEYVWNVTAPSLDRGWTHCGTIDHDKTRYFKSVRRKMLYLTRDGRRVLKDTNDSSADFNTECVPSLIEQQHTAIDANGTKAETETYDGVEVKSMGIETMYSVNVSQVATVSFEGVISDIGSKDPLSFATVQLLHGDEVHSVLSKDNGVFSFPSVHPGDYILRITYVGYDRYEKRVTLKRDTKLTVKMVPSGNSLNEIVVTARESQGLVSSSKINREMMTHLQPTSFSDLLELLPGNISKTPSMGQVNSIQLRETGTLNSSGEQYSNPDYAITSLGTLFLVDGAPLNGDANLQYIPGGTSSDGTSPESLRNMTNKGVDMRTLTTDDIESVEIVRGIPSAEYGNLTSGMVNIKRVRKATPLTARFKADEYSKLFSVGKGFTVPNHDFTLNVDGGFLDSKVDPRNNLENYKRVNFSVRISKLWRRDKWEMTWTPSADYTGSFDNVKTDPDLSYQKIDKYKSSYNRASLTNNFKWTFPRLKWIKTVNLDASVSAQSDQLKRTKLISPQRATVAPTGKEPGVHDGTYLFSEYVADYLCDGKPVNAFLKAKGEFGWEGAKYRLNAKAGGEWNYSKNFGKGQVYDLSHPISTSWGARPRAYSDIPALQNLSFFLEGNTLFLLGKNKLELQVGARSVTQIGMSERYLLQGKPYIDPRANAQWSFPAIPVAGKDLHISISGGYGVTTKMPTLDYLYPDLWYNDIVQLNYYDVNKPLEYSRVNIITYIEDITNYDLKPARNHKWEVRGDISFEGNRLSVTYFHENLTSGFRTSSFYAPFSYRKYDHSAVDASGLQGPPALEDIPYTDMKALNGYRQSANGSRIDKQGIEFQFTSQRISALRTAVVINGAWFRSVYTNSRPMFETVADVVDNRPVSEEYVGLYDWNDGRVNEQFNTNFQLDTQIPEWGLIFSTSVQCMWFVSTRVMWKNGVPVSYMAASDGKLYPYTEVSAADPKLQFLIKTYNDDLYKKQTIPTAVYVNLKATKTIGKWLRLSLFANRILDYLPSYKMNGLLIRRNVDPYFGMELNFTLMKKFLLSTLLFIGGILGSIQAEGPVFQWAKSLDGNPGNGGDNAHSLIKSSDGKILALAQFGSMKDNDPVYYGDDIVGYGCATQANSDNCNIVLLKLDSDGSKIWSLYSFSGDVSISSSSIAATSDGGAVLALKMRYASGMTDKTPAFKDAKNNTVTIQNWNTGYRTYYAVLLKVSSEGVIEWNKYIEIDNSPEASATHYTEGTPDGIYPYATATDENGNIYLAGNYRKTMTFYTAENSPVQLIPHNTVNWNGDSQKTVGDLFIVKLDDKGNYLGHFTTTVSGTIEREQITHLIYDNGKLYFYGTVKNSNEGSINLGSINLVPSSFDDILIGEIDTNLDVKWAKLITAFGASDSKHTTQTKNMDYINGSLYLSGMMKGGFAPYGEEEARIASKSTPLNGFVIKCDASNGEWLGGVSADEQGIGGYFGVAKGKENNLYAYGYSWATPNKGICLTTIDESSWKKTEKIALITETGMGTAWSCLADGTNFYSFSRGNKAVNFYNSEFTLPAPTGWGMFISSWKLDDIATGIETPNLAGNDTRIYGVQGGVVVNTEEPIDVYIYNITGALVKQIKVTGNETIELPKGIYIANKQKVMVYMVYEMFIFIERWRMPPFFLHQSNKPKIPNRGNLCPGLGSHILPIMKKLFSIMLGRCFALAFLLFFSGKSFAENDNYTRAADTFKAIEKLYGVEDVPLFRETYPFDNHLKVSYLSNQEQAEQQKLYSYLWPFSGSLSAVTALLEVKPKSDFRKVLTKTVRPGLEMYLDTRRTPTAYASYINTAPVSDRFYDDNIWIGLDFTDLYLLTGKKEYLSQAKMVWRFIESGTDDKLGYGIYWCEQKKNGKNTCSNAPGSVYASKLFLATGDSSYLQAGIRLYEWTKENLQDPADGLYFDNKSLNGEIGRAKFAYNSGQMMQSAALLYRITSEKKYLQDAQRLAAACYNRFFSHDLQSGRKYKVLNRGDVWFTAIMFRGFVELYGIDHNSLYIDAFRENLDFAWTEMREKNGLFNDDWSGKTKNDSKWLLTQFAMVEMYARLAAIDKENNRMFFTGLGIVLCSVIFFVRFYIDGKSRGTEISRKNCKIVMKKITFLIACLLAVFGMSAINHYDNLYVVGDACAAGWSPDDALEMTKVGDGQFTWTGELLDKTGDRRFKFLVGRGWDPCLAPNPDVPDHEVVTPGVPAKLYDKGEHGGYDTSFQVEKTGVYTITIDLDAETMTLTEGSLDVLDVEKFGQAYLAGSAFPERVAMTKESDGVYTWKGKLEVEDPVTGFYIVSNDNSQSLNPANASEVKSGSYAPVFSADEVATAEYQIASTATYTITIDLNTVKMEVTKIDYDHLYLIGSAMKGEPGAWKTEDGVEMTRVSEGVFTWNGFLYAKNSEGGDTEFKFINQLIAGNWENCFVFDQTQDGNQLITLGETYTISYFTAGNHDNKFTVPSDGYYKLTVDLNALTLLVEQGDPTAIEEVSAAVKPVVTVSGSTIQVLTNGAVVDDVMVFDLLGNCVASTAADSDCSFDMAHGGVYVVRINCGNAVYSNKVIVKMKNKCIYGLLVGAMMAGACPVWGETVVGETVSPSDSIKLVVVSDNDALYYKVVKGVTSIVEKSALGITTSVGDFSTGLSEPSFTERLVDDSYSLPSGKRSRYDNTYKEATVSCNKDGHTVQFIFRVYDDGVAYRYAILGSGDISVYAENSECLPVRQEKVYSQQYTKNNQALYEENDREFMACELYTPLPLLVHTGSDYLLLTEAMVNGNYCGSSLFVNEETKSYGYRLVGNVAATLPLYTPWRVLMVGSLESIAESVILENLNDKTALTNLSWVKPGRAVWNFGGEDFHSDYLSMSNIKKYIDWAKQQGWEYFTLDKCWEQNGVSLKEVVDYASSKSVGVFVWVNQNSLPSDESAMVSMVQNWKSQGVKGLKVDFWESDDQAMMKKYDSLLKVTAEKQLLLNLHACTKPTGLRRTWPHLLTSEAVLENTVFTTFPDIHNINSAIIRGAIGSTDYVPVDFADKNGCIHQKTTAAHQLALSVVFESGVQHIGDAPENIEYNIAREFLKTVPAAWDDTRCLEAVPDEYVSIVRCKGNEWYFASLTHDARTVSVPLSFLSSGERYNAYIYKDGECPSEIQFEWKENLTSKDTVSIDLLKHGGTAVLFSMSSQLPKPILMKYEAEADGNTIPFGVPVKTDTDSLCSGGKYVASIGNGRSITFNDVKVPESGTYAMTVYYMSDSPCTAYVKMNGNMDSWQEVSFVGTGGTSGGNLAHKTIWVDLDHTISNTVEIGNNSEYGPNIDRITLSKYADGTTDIETPESTEPVGKVYALDKHIVIEQSSSTDYWVYNSLGQILKEGSFDGGRASLSVDEKGVYLVKVHTEDKVFTKKVLIGQMKKFKILLLSLLPAAGLCAQNPLLVLEAEDAVLTPPVKVKYVNGYSGDAYVGDNDNGSEILFRNVYVDKEGTYEFRTYYTSMFIRSIAVQTGFYAPVVIGMTETTEDWNRPPVGMMLSYIYLDKGDNTIKITPYNGGGPNIDKFEIWETEVKMPKPEKMKAAYAYDLTDNAAITIGGKDISGSALNDNDEYTVYDLQAASDYIYVTCTDPCLVTGYLFSEGEVTSQNVDSWSLEYSVDGRNYSQLNSGGSTRYSAATLFTISRQPHADAGKAARYYRIDTKGRNVGEIQLFGIPYYESADHKNFPADITENVDVFSNVIGSPLGAFTIADERYFNLFDRDMERKYYSDESPVFNVEVELDKPYRLDYYTLTSCQDYPERDPKSWVVEGFDKDWEAVSEVNGFVFPCRYATMKFAVNGTKLYKGYRLRTIENNGADSFQLLKWQLFGSDKPSSVTKPVAEGIDVATQNREIVITMDSDGFCKVVNLSGQIVYESEIAGRVNRIPVPPGAYLVGVIVQQERVVQKVIVKMKMVANITNDISLLRQIREGNEDAFKSLFETYFTPLCRFIYLHLDDKNVAEELAMDIFIYLWENRETFQIQLSLKAYLFQAAKNKCLNELRKKKETVGLDGVEVSTINTSVSTLETEELYRLIQEAVFSLPDKCRNIFLLSRSENLTNQEIARRLNISVKTVEGQITTALKKIKKILGDQYSYLWMFAAKIKKYKSLERFLLPDYKVIIKWIPIPIRHFFFFIIYTYKGQARFLCLSNMNNNLPWDIIIAKFEGISLSEEEQSQLQNWLAADDKNKLLFDELKTLWDSIQAKSANYNPDVDYYWKKFQAYIHKDTIQKEPIKVKKIVPRLHFGKKLNRIAAAVSLLLIVSGIGYYFFSSNKSLNRETIVQTYSTITGKSKFILPDGSEVWLNSHSKLEYKNLHADMREVELKGEAFFKVQHDERPFIVKTSDIAVKVHGTQFNVSAYHADEKSVVSLYEGSVSMHVLGDDSSNCYLKPGEEGSLDKKDKTIRVEKGDVEFAKMWTNEKVKLENKNLHEVCKYLSKWYNVKIIIDPALSDDQSYTFTLHDQSLEDIIRIMSNISSINYHFTEDNTLMITLMNLKKKLAVFLAILFSLNLFAQAPGETITISFQNIPLSEAIKKIESVSKYTFFYDALKLNVDQKVSLNAQKTPIQQAISQMLGNSGIKFEIKQSQIILYNKNVSSDEKKISIRGNVTDVNGEPLIGVTVSVKDNPSIVTITNVDGIYDIKVPDKSAILQFKYIGFASREEAVNSRKIINVVLQDAATQLEDVVVVGYGVQKKASVVAAITSVKPQQLQVGTTRSLSNDLAGNIGGIIAVQRSGEPGYDNSEFWIRGMSSFKGSNSPLVLVDGVERSLNNLDISEIESFSVLKDASASAVYGVRGANGVILITTKRGHSGKTNINVSVEHSITRPAKLPSFLNAADYLTLLNNINIQETGTELYSPELIDKYRSGYDTELYPDIDWIDAITKDVAHNTRASFDLSGGNEKLRYSFVGAYYNEAGITESDKTQNWNSNISVNRFNLRTNVDMNVTSSTLLTFNIGGYLQQRNAPKDGIDDIFGAAFKATPYMVPLIYENGALPKPRENENPWAKLTQSGFKREAESKLETLFAVEQDLKCILPGLKIKGIFSYDYYSRNGVNRGKAPRYYSPATQRDPVTGELILTVLSEGGEFLGYERWEDYGNYSTYLEGNITYDQRFGNHSVSALLLYNQRNYDDGDQVPYRTQGFAGRAAYTYADRYIAEFNFGYNGSENFAKGNRFGFFPSIAAGWIVSEEEFMRPVQNYINKLKLRASYGLAGNDRFYNDDGSQKRFAYITTIGSTDGYKWGNSNAFYEKGGLREGDPGVESLTWETVKKANVGIELGLFKMAELQVDFFHERREDIFMQRKNIPSSAGFPSAPWANYGIVTNKGFDISLDLNKQINKDWFISARASVTYAKNKIIEQDEDLGVLGTYRSSTGKPVGQIFGLVNDGLYTEADFEDVTTGKLKPGLPVPKFSDRVYPGDIKYLDLNGDNEITETDKTAIGGTVNPELVYGFGINLSYKNIDFGAFFQGNGRTYRIIGENQKNFLPGSTIGAEGNIFTNASDAWTVDNPSQDVFYPRLHMGYNANNAQVSDWWLKDMSMLRLKNVELGYSFSKNLIKKAAMEYARIFVRGTNLLQFSKFDLWDPELNTSNGLKYPIMATYSIGLQVRFMKHTIVRYTLAIIGLFSVTSCTDYLDNAPDDILTLDMVFNSKNRTEEWLAGIYDGIPDPYTPMMRNYDAYADDFSPSQDWRAFSDWDCIDKILGNWTPQSEWKGNFWSDFPVRIREAYIFLDNVKALPEQEVYQADVDNMKAEARFLIAYYYYLLVNTYGAIPFQTSLVDMNDPIDKILIGQTPYDQIIDWLDKEFKAVSELLPPSYTEERKYGRATSVMALAIRARMLLFAASPLVNGNDDPDYAAYTNNKGEAIFNSTYDPKKWERAVNACKDLLTEAEGNGYALYKEYNGDGSIDPFMSYSNMCYKEFNQGNKEILFARPDVSYDLYSQHSVPRGSRGQGGLGVTQELVDAFFMSNGLPAITGYEPNGEPIINKASGYNESGFSTQPDVRKTKWIEGDKDAKESNAENTIAPAGTFNMYVNREPRFYVSVLYNGAWYRQSSRYVDFYYAGEDGRPASGSLWDAPQTGYLLRKRVHPETNILNYSIPYRPGIICRLAEAYLNYAEALNEWAPEQTDEILKYVNLVRERAGIPQYGTGKDSNGLDKIPAPADQTAMREAIRRERRVEFNCEYAIRFDDIRRWKQIDILRGDFYGMNKFGTEKSCDKNNENAYFKRRVEITRAFSEKNYWFPIHQNQLDKNPNLRQLPKWMKTIYHILFSLLFVLAFVGCDDDDDKVIERNQLKLTASAQSVTLTPDATDDEIISFSWNEATSLGADYTFSYLFQIDIADNNFQSATDVRTFGPNESISYSSAELYDLIVEKWGKTAGEAVYVEARVAAKVEGPKFKYPEIATTKVQITTYKPTSQPFYITGTATTGGTDLNAAEKITELSNGRLYNWRGQLKQGGFKFITTLGQALPSYNKGADNSSVVKRTSETEADDLFQINEAGLYYIYLSLKDMTISYKKLLYENLYLVGNATAAGWDIEKIIAMTPDNLNPNIFTYQGALQEGELKILAQRKFDGTTFKPLVENGSIESTDVQVTPGEQPDYKWKITAEQAGLYKITLDTEKMEIKFEKQMKKNLLALAFLVGLLTCCKSEDAPIKPVKPTDPGSINKEYMSRAETTFANIFKYYWSDKVRMMFGSYPNTLGTPQEPSSPDYDSHAYLWGLGSVVSAFNAIVQNTDNVDFRMTYESRLKETLLKYYNTTKEPMCFGCFVNPHDQRLYDDAIWVGIDLADLYSKTKDSWYLDYAKSVWNFVLSGKDDELGGGVYWDENAKDSKNTCSNAPAVVLALKLYQITNDAAYLENGKDIYKWTKSKLQDPSDYLYWDCIKTSGKIETSKFSYNSGQMLQAAVLLYNATGEEQYLTDAKLLAEACYNYFFENFISNSSGEQFRILKDGSRWFNAIMVRGFLELNKVESNGTYMIAIRKSVDHAWKYTRDAETGLFFKQFSGNDITDNPGDILAQGAMVELFAKLAVNMKLNGIIVALCSVGILNAHAENVAIAKSSLVGDGIVEFVPQGFDQTKTPSLILKEEPTAKGSVPSDWELYPQFTVMDGKANASLGLTGEISLYGGGEVTGPLLRNGQYIKLWNTDTGAYGVDGGKRLYQSHPWVLGVRRDGSAFGILFDSSWKSELHTNSDKIEFNTEGALFRIYIIDRESPKDVLKGLAELTGTITMPARWTLGYHQCRFSYGSEQKVREIADNFRSRNIPCDAIWMDIDYMDGYRIFTFNETTFPDPKALNEELHQKGFKAVYMIDPGAKVDKNYHVYQSGTENDVWVKRPNGEIYEGKVWPGYCAFPDFTMPKAREWWSNLYKDFLALGIDGVWNDMNEPAVTDDDIPEENRIGTMPYDTPHRGGGNLPAGPHLLYHNAYGRLMVEASYEGIMKVNPEKRPFLLTRAGLLGYQRYAATWTGDNWAGWDHLKLSVPMSITLGLSGQAFNGPDIGGFLNNTDADLWAHWLGFGVFLPFARGHACAGTNDKEPWAFGEAIENTSRIALERRYRLLPYFYTLFYEAHKTGVPVMEPVFFADPKDLRLRSEQQAFLLGDNVLVIPAFAENPVLPYGIWENMTLIDGEYSDKYQAKLKIKGGSIVPVGKVIQSTTENSFEPLTLFVCLDENGKAHGQLYWDAGDGWNFQCGDYSLMTFSAEKKNNQVKVSLASKEGKRKIEKEIKALNVELMMNGKVYKGSGSLKKGVTINLMKNRYSIWRLMSLGAALMTAPWLQAQDVLVTLEAEKGIITLPAKVKPVDGSTVEGISGGKYVGDNDPGSSIVFNDVEVPEAGTYEFKTYYMSMQNRSIAVKVNNYSEYISTVSNTTPGWDVPPTNEMSTYIYMDKGKNTIKITPMGSGGPNMDKFEIITTDVELPKPGEFPIVLEAETAQLFGNLKVKPTDGSSVVGLSGGKYIGDFDLAANSYLRFNNVEIPEAGTYELKVYSMGSSRALTIKVNHYQKSIIRTKDSPNWDNAPTSMVSTLIYLDKGTNTLTFGLHEDNGPNIDKFEICTTTEEIDKPEVEKIAYSYDFTDEAEISSTQENSTLSLLTDNDEYTYYVPETSNVEIVAKCQQPVLLTGFLLSAGIDSEIDVDTWKLYASANGSTWKEISYDKVTDLDGAHLYEITRYPGTAAADAAQYYKLAATHENLEIAEWQLFGLPYVASGDKNFPTDLTENIDVRSNVSAYPIGESGDNFSEEFYNLFDRNMSTKYYAHEATSFYVEIDLEKPYTIESYALTNAHDYPDRDPRKWILNAYNEELGWVELDRQTDTYFPTRYSTLKYNVNSSTGFTKVMLDVEANNGAKDIQLLKFQIFGKEFNGAGINAAQDKTLSIIADQGKIIISQTEGKPVNYTVYNLSGTVIEQGTTDVSYREIVLNAGAYIVSANDGSKNKIEKLIVKMKSRRYKLPLIALSLSLALPAFSQSWFTPEVEKRAEDILKNMTVKERLTYIGGIDWMYTRAIPRLNVPAIKMSDGPQGVGTWGASTAYPCDLLLAATWNPDMAYAFGAALAQDCKARGVNILLGPAVNIARAPFCGRNFEYMGEDPFLTATTSTGYIKGLQENGVMGVIKHFTANFQEYDRNYVSSNIDERTLHEIYFPAFKSAVQNAEVGAVMSSYNLLNGVWTTENPWLLKEVLREQWGFNGLVMSDWGSTHNCVPAVKNGLDLEMAGNEIENEEALRHYLETGEINMSEIDLKVKHILQTMIGFGFFDKEQLDPSIPLDNPETAKAALEISREGIVLLKNESNILPLNANTIKNIAVIGNNATIYAAGGGSGLVRPFHYVSYFDGLKKLANEKGINVTLVDLYDHMEDVLYTAAGSNEHGLKAEFYNNENLSGTPVTTRIDSRINFEWTSGPDAANVEKNYFSVKWTGEIRPEETSNYTFIVKGDDGFRLILDGKTVIDEFKSGSTREKRYTMKMEAGKAYKIQLDYFQGGGGACIDLAWLKDGDENRFQNELDKADIIVAFIGHNSSSEAEAGERSFGLPQDVKDLVLAAQKSSKPMIGVVNAGGNVEMQDWEPKMKGLLWGWYGGQEAGTAMAEVLFGEYNPSGKLPVTFEKRWEDNPCYNSYYDNGTKQVNFTEGIMMGYRGYDKAGTEVQYPFGFGLSYTTFNLSDMQITESSDDKYLVEVSCKIKNTGKVAGAEVIQLYVGKNGSSPVERPIRELKGYQKVYLEPEEEKFVTLYLSKDAFSYYDVNRKNFVVDNGEYNIELGFSSRDIKLKDQTQINVVSAIDEARQDTEKGNLIPSVVKQGEIIRIAQGCASELNIFDLTGQMLLKQIDKCTIDTSYLKKGAYLALYKIDEKFHTGKFIVEMVEIGTVLTPVGKKALLCGSGELGKEVAIELQRYGVEVVALDKYANAPAMQVAHRSHVLSMLDGKKLREVIETERPDYIIPEVEAIATDTLVALEKEGYSVTPTATAAYLTMNREGIRRLAAEQLGLPTSPYKFASTREEFEEAVKEIGMPCVVKPIMSSSGHGQSVVRTADDIDKSWHYAQEGGRAGAGRVIVEGFVQFDYEITQLTVRHSAGTTFLKPVGHVQVDGDYRESWQPQVMSEKALQKAQDIARKVTDALGGYGIFGVELFIKGDDVLFSEVSPRPHDTGMVTMISQDMSQFALHARAVLGLPVPGVRFYGPSASRAIVVEGDTDKVVFGNLDEVLSEEGVQMRIFGKPEVVGHRRLGVILATADTVEEARAKADRAYKKLKVKLLPRMKGSIVPIKPEVVVKVIECGPLRIGGHVRIMFSDGSMVIKQRAFICRCGKSSNQPFCDGSHVEDMNAEVIGTWAGQVWNALNESGKLTVKGLKKATKLKEKELYAALGWLAREGKVSMYEVDADIEVVLLMGQTKSPVECFYNVYFSFVEGVDNMKKHIEALKLKKNVLTLCQIKTMCFQVVMGKFEVNILGCGSALPTARHYPSTQILNIRDNLFMIDCGEGAQIQFRRMRLKFTRLGHIFLSHLHGDHCFGLIGMISTFALVGRTGELVIHAHPQAEQVFRPQLDFFCRDLPFTVRFEPVLPNRTEVIYEDKSIRVRSLPMIHRVPCSGFLFEEKVGMRHLLGDMMNFYNVPVYRRAAIKAGEDFVTSDGRIIPNSYLTTPADPPLRYAYCSDTAYNEALLPIIEGVDLLYHEATFGDDAEALAKETCHSTARQAAIIARKAGVKQLLLGHFSARYENEQQLLEQAREEFAPSFLAREELKIILGRMSEELKNSPVENFDWDAFEKGEVYGDKSHDELVNTYDQSLNTVKDKEVIEGTVIALNKREVVVNIGYKSDGIIPMSEFRYNPDLKIGDKVEVYIENQEDKKGQLVLSHKKARATRSWDRVNSALENDEIIKGYIKCRTKGGMIVDVFGIEAFLPGSQIDVKPIRDYDVFVGKTMEFKVVKINQEFKNVVVSHKALIEAELEQQKKEIIAKLEKGQVLEGTVKNITSYGVFIDLGGVDGLIHITDLSWGRVSHPEEVVSLDQKLNVVILDFDDEKKRIALGLKQLQPHPWDALDPDLKVGDKVKGKVVVMADYGAFIEIAPGVEGLIHVSEMSWSQHLRSAQDFMKVGDEVEAVILTLDREERKMSLGIKQLKPDPWEDIETKYAVGSRHHAKVRNFTNFGVFVEIEEGVDGLIHISDLSWTKKIKHPSEFTQIGADIEVQVLEIDKENRRLSLGHKQLEENPWDVFEGIFTVDSIHEGTIIEMLDKGAVIALPYGVEGFATPKHLVKQDGTQAQLEEKLPFKVIEFNKDAKRIILSHSRIFEDEAKAEAKKENAAKKAAKKAAKADDAIVTPQMEKTTLGDIDALAALKEKLDAEKKMGGYIFSLNKTKLYSVYCMAESFVEMNICLCQRVLGDYIPEIICREEKILYLRTDFNKTIMNRQKITWLQILQGWSMLLVVIGHVTLTGIFENPQTPVSATIERVIYSFHMPLFMFISGFLFYFTKISRNLAYKEVVFDKLKRLGIPYLFFTFFTFAVKFIFSPFMKRPVELSLRQFTDSFLYPGSNPLSEMWFVATLFIIMLSYPLLKYMITGHFKIAVLIIGSVVLNLFFPPDIFLLCLSNVAYMFLFFCLGILFCKFDIQRFLSHSGSLLLSLLLFIALNLIPDCPILLLNLTGIIFSVSLCLNLTPIVSGLFSSFRDYTFQIFLLGIFPQIAIRILYSKIPQNELSYWSLYIISILLGIYLPVFIAKIVEKIPNKLIRCCFGLMVDRAKDERFMRMALQEAKEAFDADEIPVGAVIVCKDRVVARAHNLTECLGDVTAHAEMQAITSAAASLGGKYLTDCTLYVTLEPCVMCAGAIGWAQLARVVFGAGDEKRGYRRFAPQVLHPKTEVECGVLAGECIALMKDFFAKKRMKNKWIVPAIIIAVGLFLLGQRIEQGIVRSKEAVRTVSVKGLSEREVPADKVIWPLVYKELGNDLGTIYRTINTKNTIVINFLKANGISDAEISIAAPGIVDMQAERYGNQSVPYRYNVTSVITVSSNQVEKVRELIVKQASLLEKGVAIVSGDYQYNTQFLFTKLNELKPEMIAEATQNARVAAEKFAKDSDSKLGKISSAYQGQFSIEDRDANTPYLKHVRVVTSVVYYLKNMYPLEIKYSAARSSPVFPNWLCCAISTNLEKRIYEDSMKKEIGARKSLMDMANNYLMDIVAYRDKTLVVVEVKTRKNNEFLRPEEAVTLRKIKNIIQATDAYIRMFDIPFDIRFDLITLVGENEDFQIEHIEDAFLPPLNCRMNVESLREFCLSLPQVTECFPFDEWVLVFKIEGKMFLFCDLSAEEKRISLKCDPELAIELRERYPEIEPGYHTNKRLWNSIWLRPSIDDKVICDCIVHAYSEVLKKLPRIKREPLSELLEVWKQKKMETKEIKFQKTHLKEIGSTNTYLQESDKDRHLPEGTIIYCDIQRSGRGQRGNSWESEPYKNLTFSLLLRPEHIPANRQFLLSEIVSLATVDVLNRYATGFSIKWPNDIYWHDKKIAGILIENVLSGSTFSRAIIGMGLNINQKNFYSDAPNPVSLYQITGRTYKIEKILDEFTEAFGKRYTDTFTNSSDRIHKEYIATLYRNDGVYPFYSDGNIFHASIADVELDGHLLLSTESGEKKRFAFKEVSFLLMYIRRIIGFFLFCSIAFSAFAEMPYRTVLRKADDHFVNREWQEAVAMYDVLLERRPGRVKTYVDAVVASAMMNDSSSIMQYVVRSEMQGLSLDSLFTGIDVLSRSIGQSGIYEQVLLLVKEQQPWFTRVTNNYLLGYYVFRHDAEKILAVADELLSVMPGQINYLKAKADALLLLGNDTAAVEVQKTILDIDSLNFDANLFLGSYYAIKGQEKLKSIDQQYLEDSNGISISASVYKEEKRQVIDDDIACAKKYFTIAARVRSNKYLSEQLSMLSGLSDELPQSSGVIRPFLKRLKQEMLCIKLLFINIILIYFIFRMKLVQSLCLIDSSGLFTGLLQVSRGICFIFVGSIAYITELICYLCKYENRMRFGIVKLEIKFPFVSALTFRYFCLFIMGDNMKKLYSKLLTLVTIGFYSLSVWAQDAPVIQNYSDYTGDSFVANWDKVSGADKYFLNVYTNGTNVQNVNETFGNINHSNGKIDLQSPNYPNGWEINVSENGSTDMVVYEGVNKIILDATDDYISTEQIIGTGVGKYIVNANLINAENITQENSSLFKIEIFDKAGILLSTGTIETLLFAQITEFNIFDGFGYTQANIGRIKISIEKGDGKIGDLMINSISYSCTEPSYILKDQATAENSYPVTNLDPEKEYYYYVAASVEGKTTNASNIIRVNGFLTPKALDATGTSENSFTANWERLPKAKGYIVQAYQYHTATQDSEKKILDDSFEKSTEGTMDDPISVTDPDLYTAVPGWSGKNILAANGMLGADNGRFPVSLSYLWTPTMNLSSNNGKYKIHIKAHGTAGDYLSIYRIGYMIDSNGDGEPDALNIHKVTAFDENGYTEETWEMEDGAENMQLSIEENKLKRFFIDEITIIQESKAGEVTRIPLVPVTISDGSQTSYTFTDLETNGNYGYEVTGMRYNDYEEEEYSETSNLITVQLIHSGIESSTTQNVKVIASENSINIALSERALIQIFTANGQLVKTINGTSGENIVSIPAANIYIVKVGSKIFKVIARMNNQYKRILLKLSGESLMGEKQYGIDEKRIAEYATQIKEIADMGIEIGIVIGGGNIFRGLSGTSKGVDRVKGDQMGMLATVINSLALSSALEKIGQKAQVFTAINMFPIGEYYSKWRAIEAMQNGTVAIISGGTGNPFFTTDTGSALRGIEIEAEVMLKGTRVDGIYTADPEKDPTAKKFDKISYDEIYTRGLKVMDLTATTLCKENHLPIIVFDMDTVGNLKKVLSGENIGTLVYMDDVKTYLNSAEEKMAMAIEFLDEALAHIRAGKANPRILDGIRVDYYGSLVPLSNVANISVPDARTIVITPWEKSMFKVIEKAILDSELGITPENNGEIIRLSIPPLTEERRKALVKQSKQEAENAKVSVRNARRDAIDGLKKAQKEGMPEDVAKDGETSAQKLHDKYMKKIDDMFAEKEKEILTVMEGLVTKNTGSWYIVRTENGDSIRCKIKGNFRLKGIRSTNPVSVGDLVDIELNPDQTAFITRIHERKNYIIRRSSNLSKESHIIAANIDHALLIVTVNTPPTSTTFIDRFLATAEAYRIPVCIVINKSDTFTEEDREYAEALRYLYTSIGYDCHCVSAITGEGFDFIDSFIANKITLLSGHSGVGKSTIIDRILPNAHVKIGAVSTSHHKGMHTTTFSEMYPLPQGGYIIDTPGIKGFGTIDFNPNEVAHFFPEIFEISQNCRFNNCTHRHEPGCAVLKALENHQISESRYTSYLSIIEDSSEGKYREAFMRYKGIGILFFMMANILSTNAEGKDLLVPSKTDTVTIDTLSTKNRISLPLPNTLVNKQIDRLVEYARKYIGTPYRRGSKGPNRFDCSGFTQYIFNHFSYSLNASSASQYLQGISVKDEEICRGDLVFFKGRNPRRSNVGHVGLVTEVYPDGRFKFIHASTSQGIREDWNFSPYYAQRYVGARRIYFVQIDKRLILDAILELEDIDDNTPFTEMEKSITPQEFSTFVRAEMKKFWLVFMGLGMSLYSFSQIETDEEIVDTDTIEVALSDTIDNAIVYPESMEADLNNLLTDWYMQQYAVVDDSCLVNSVNVDYPDSVYIRKLSQLPTVIEMSYNSVVRRYIDMYVQKRRALVENLLGLSTYYMPIFEEALEREGLPLELKYLPIIESALRPDATSRVGAAGLWQFMVKTGKSMGLEVNSLVDERRDPIKSSAMAARYLKDLYSIYHDWALAIASYNCGPGNVSKAIRRSGGKTDYWEIYPYLPRETRGYVPAFIAVNYVMNYYGDHNICPVLTRRPLLTDTVQVTRRVHLQQISDVLQIPIEEIRSLNPQYRRDIIPGNIRPYALILPSQQVYAFIEAQDAIFAHNQELYARRLAVEPAGLAPGTTVYHKVRKGETLSGIAQKYGVSVSNLRSWNNLRKNSYLRIGQRLAVCSKTTTSKSGVSSTASSAKGQYHTVRKGENLWTISQKYKGVSAEDIKRANNLKGNAIQPGQKLKIPAAMGISGDMGLRRAVIIIFIIALLPLSILEVKADSNIGYQELVEVEVNSADTVEMENARYNRPDSISVISGDSVGALFQDSVPVMITDSLGGLAPSDSLGMKAASRKSWRPSDFNPDPMRAVWLSALFPGLGQIYNHRYWKLPIVVGGYVGLFYATTWNSRMLSDYQRAYLDIMDSDPGTNSYMDFFSSSYREEDIDKEWLTRVLKQRKDYYRQNRDLCIICMIGLYAVCMIDAYVDAQLYHFDVSPDISMKWQPAIIPTGRTVLPSIGLQCAITFMATPKRSALGRGLDALISMDNIVTSGTSSIHEIELSQIVPNPDQPRREFDQEALEELASSIRELGIIQPISLRQVDGGNYQIIAGERRYRAAQMAGLETIPAYVRTVEDETLMEMALIENIQREDLNSIEIALAFQKLIELYQLTQEKLSERVGKKRTTIANYLRLLKLPAEVQIGLRDKRIDMGHARALLSVADPALQLELYERILSDGLSVRSVEDLAKTLSAGGERARKKAQKKVMMRQEYNVLKSHLSDFFNAKVQFTCDEKGKGKISIPFKNEEDLERIIGLFDKLKMGKIIAIANQKGGVGKTTTSINLATSLAVLDKKVLLIDADPQANASSGLGVDPQQVKSSIYECLVGQSSIKESVVETCVEGLGLVASHIDLVGAELELMNLKNRERVLSHVLSEARGDYDYILIDCSPSLGLITVNALTAADSVIIPVQAEYFALEGISKLLNTIKIIKSKLNPQLEIEGFLLTMYDSRLRLANQIYEELKGHFGNLVFNTVIQRNIRLSEAPSHGLPALLYDCESRGSVNHMELAKELIMKNRMLFFLHEDSVAGSKTKSHFLRRDTLSSRVSHRKGISFNLYFILSDAQKYHNCMFDYYKDRVRRESKQVHSDIPRLTSFLLYAKVMNNTRFFYVLTDNMESMKKITRSHKPLILITNDDGIQAKGIREVADFLKPLGDILIVAPDAPRSGQSSAITVTSPLRMKVVEERNGFLAIRTNGTPVDCIKLSMNILLDERPDLIVSGINHGSNSGVSVIYSGTMGAVFEGALLHIPSIGFSLCNHKADADFSHCRELILDVCQKALTHNHWPQNIGLNINIPDVPQLKGSKICRAAQGHWTEEYDCRTDPHGQEYYWLTGKFKNAEPEATDTDEYWLERGYATIVPCTTDNSVLNILPELSSVLGIMKNKVARLQAIREIIIHSRVKSQDEILKKLHELGFDLTQATLSRDLKQLRIAKVPGNDGSYVYIMPEIGSIGKLMQEKLSENPERQIPGGFISINFSGNLSVIKTRPGYAGSLAYDIDSNTPPEVLGTIAGDDTVLVILEENISHQQAMLALSPFIPVLHDMEEIKVFVADERHIKYVDTILDTIERAAKIRGTGIAKRSPEYVKQKMLERKAIIALDGDKFAGFCYIESWSNKQFVANSGLIVVDTYRGHGLAKRIKRKAFELSRERFPEAKIFGLTTGEAVMKINNELGYRPVAFASLTDDPAFWKGCESCVNFDILQRNNRRMCLCTGMLYDPHEHENKDNQELKMAKKKVVLAFSGGLDTSFCVKYLSEECGYDVYTAIANTGGFNQEELKSIEERAYKLGAVQHATLDITQEYYQKSIKYMVFGNILRNGTYPISVSSERIFQAIAIINYAKEIGADYVAHGSTGAGNDQVRFDLIFQILAPEIGIITPTRDMTLTREYEIEYLKKHGYTADFKKMEYSINKGLWGTSIGGKETLKSDQTLPESAYPSQMTATQSKTITLDFVKGEIAGINGKAYDNKVAAIQDLEALAAPYAIGRDMHIGDTIIGIKGRVGFEAAAPMLIIAAHKMLEKHTLTKWQQYWKDQVGTWYGMFLHEAQYLEPVMRDIEAFLDSSQQNVTGRVIIELHPYRYVLVGVESDYDLMKSDFGEYGEVNKAWSADDVKGFTKILGNQMKIFYSVQNKNKKMIKVGIIGGAGYTAGELIRLLINHPDVEIIFVHSESNAGNKITDIHTGLFGETDLIFTSETPFDEIDLLFFCTAHGDTRKFIESHNLPEELRIIDLSTDYRLDAPGNDFIYGLPELNRKYIIRSKRVANPGCFATAIQLALLPLAKNLLLNNEIHVHAITGSTGAGQKPSQTSHFSWRNDNISIYKPFTHQHLDEIRQSLSKLQNSFSAPINFIPVRGNFSRGIFASLYLDCPVEIELLKDLYNSYYDDHNFTFLTDKMPDLKQVVNTNKCLLYLEKHDNKLLIVSVIDNLLKGASGQAVHNMNLLFGLHERVGLHLKPSAFMKLFDVYPLFDIEIKSGKGCYTYDTEGNEYLDLYGGHAVISIGHSHPYYINKITEQAQRLTFYSNSVKNSLQQQLADKLGKISGYEDYSLFLINSGAEANENALKLASFHTGKKKVIAFSKAFHGRTSAAVKVTDNPKIVAPINDTFEVAFLPLNDIERVKKEISKGDVCAVIIEGIQGVGGIQVPDTQFLKELRNICTQNQVVLILDEVQSGYGRTGKFFAHQHSGIRSDLITVAKGMGNGFPIGGVLISPAFTPVYGMLGTTFGGNHLACTAACAVLDVMQEENLTENAATVGEYLISQLKTIPQIKDIRGKGLMIGLEFDYPVKELRNKLLFEQHVFTGASGTNVIRLLPPLSLSKEQADCFIGKLKNILSMKISIIGGGNMGGAIARGLSQSSIVAPSEITVSNRGEEKLNELKSFNPSIHTTTDNKEAVKDADVIILAVKPWILDSVAYDIREVLDFPRQIIVSVVAGITLERLSELFSSEDAAPAIFRVIPNTAVSIRQSMTLISPYNAVPEQIDYIRSLFDSLGKSLLIEENLMTAGTALCSCGTAFVMRYMRAAIEGGIEMGIYPKDAALLVEQTVKGAAELLLTNGSHPEVEIDKVTTPGGITIKGLNEMEAAGFSSAVIRGLKAAKMSVNKVILIGNVGKDPDVRYLENNVCVANFTLATTERGYTTQSGIQIPDKTEWHNIVVWRGLAEIAEKYVRKGTQLYIEGKIRTRSWEDQNKIRRYTTEIYVDNMELLGRRDGQSSPSSAPVMSQSQNNPSPANTSYNSPIENSSDNDLPFMDPDSYLSVFSSAIEITVPSGGAILAIVLAGLFLCVSAFVSASEIAYFSLTSEELQEFDEESPRDRLVKRLLARPEHLLATILISNNLVNVAVVILCNFFFSDILHFNSEVLDFIFQTILLTFLLLLFGEVIPKFYANLKPVVWARKSCKGLSLLGKIFSPLANFLVRSTHIVNKRIVRKNTNISMNELSQALEMTNVGANDEKEMLEGIIKFGGKTVEEVMTARVDITDIEMRTDFKQLLDTIIETGYSRLPVYDTTEDDIKGIIYSKDLLPYIGQEASFDWHKLMRRAYFVPETKMIDDLLEEFRTKKIHMAIVVDEFGGTSGIVTMEDILEEIVGDISDEYDEEEKNYTKIDENTYIFEGKILLNDFYKITGLDENEFGDKAEDAETLAGLILDIKEDFPKIKEQIDYGRCQFIVLELDRRRIGKVKVIINSPSEEMRLNKAILYTTLFITMGPVIFSCHRKYTPLPDGYFRIDPYPEEYKEMTLLSPFISFEIPDGTTATLDKDTTLHKNDVKWLNIRYPRYRATIYCSYHILHKNLESLLNESKDLVYRQSIRPDFIKAGNYEDPERKIYATLYNLSAESATPLQFVVTDSTRYLLRGALYFDESGKSDSIAPVIDYLSDDIIHLIESIETRAEMPFHEHISTKFGATIVLWQLTENEQTIATLLSEKERSLIDSQNLSPKRFCERAASRLSLNRIKETLNDDITYTAEGKPHLLRKSGHISISHTKEWVAVAYHPFLPIGIDIERIGEKIEKVAPRVFNAPELNISSENRGKWLHICWSAKEALFKAIPETGIDFREHLHIVPALLTEEGYLSAWETRTEATKAYTVWYRIYDDFVLVCTVPLQMIQVKTSAKCAGCVAKIAEQLNTFLTPEQWSIDLSSPDKLLTVKADVPAEKVVEAVRAAGFKAELLMEKRVIPVLEMSCAVCAATVEKTVRELTGVEEASVNFSANTLQVVYDPDKISLKDMQAAVSAAGYDLVISENAEADAIDAEHRLYLDLRRRTIGAWSFGLPVMVLSMIFHSPSQILTWILLALTLPVLYWGRSFYVSGWKAVKRGRANMDTLVMLSTAVSFLFSLFSTIYPYFWLSLGLVPHVYYEAVAMIIAFVLSGKLLEARAKQSTSASIRSLMGLQPKTARLVGKDGEEKDVPIAMLLPGDTVSVRPGEKIPVDGTVLEGGSYVDESMISGESEAVKKQAGDRVLAGTLNQRGAFWLNVQASGADTVLARMVRMVQEAQGSKAPVQGVVDKVSSVFVPVVILLSILTFVIWISVAGWNMFPYALLTAVSVLVIACPCALGLATPTALTVGIGKAAQQHILIKDAFALENMCRVNAIVLDKTGTLTEGTPKVVGEKLYSGFEEYVSVLLAAEMRSEHPLAVSLSEYLRQKGVKPVEISAFESITGKGIMCEYRGEKFWIGSKALAEENVGVLLPDLFSIYFGKGDSLVAAFEVKDALKENSKEAVRQLESYGVEVCMLTGDKESAASEIARQAGITHYEWGVLPDDKERFVLDLQRRGKCVAMVGDGINDSQALARADVSVAMGKGTDVAMDIAMVTLMNSDLALLPRAIKLSRKTVRIIRENLFWAFGYNVVCIPIAAGVLYPVGILLSPMWASAAMAFSSVSVILNSLRLRMAKDNTFSGMAHNALTAETTIVGKIVSQKDIRIDGTLEGRLECQGKVVIGETGQVIGDIVAVNAEVVGRITGNVMVAEMLVLKATSSLEGDIQARRLAIEPGAVLNGKCTMLQQLDDGGDAMKSFYSNLIIIKRYYKKPVFSLYLLHKTICMRTSIHIGALHFYAHHGVLPQEQKVGNYFKVETTLYTDFSRALVTDELTDTLNYAEVCKIISDEMAIPSRLLEHVAGRITNSLRSHYPQITGGRLIVTKEKPPIPGDIRDVSVIVEWMSILKEGKPVGLACDHAGYEMKQIVMRELDVRGIAYKDFGTYSTDSCDYPDFAHPLALAVEAGECYPGIAICGSGNGINMTLNKHQGIRAALCWTTEIAALARQHNDANVLVMPGRFISGELCREIVDVFLNTGFEGGRHQRRIDKIPAGRMGKQKARALFNPSILCFFDREEECRPTKPYTIDLYFPTLLYLNRSISQNISYFCIRGMQKQGCLDIKMPTLCFYSLLMINRYLKIVAVLLLMIYTAFANAEIGIYDLRYTLNTDLNTKEGLDVAWDDVHAVSTLQGVVNRDAPRLYVYFVMEGNHDIDGYWWNKYRQKGEWLYGRETRTYQTMEDLFTAYAPYIEGVVVYDGNIASTSNVASSVAGIENLVAIRYDETPGSLYDRLVLHGPKLPVKRWLLNPDGTSMFTGKKGTKIPGTERYSTGSLKNDPYVWFIEKYMKTGKCNTEFAAYYIDQYWKQKPFATVRNHHTLCNHDFFVSKGAFFFDLSPWGDEPATDDPTQAVGTDLNTLKEMLLLAYRQNNNEKMCYIGGFPAWAYKYTMHASGSHDDVPTEWEFSRIISAYNAFKDADAIGYGALANASFWQHFPTKKQYTQNWISHKELRERGLLTADGKVNVDGRNFIIFYVGDYDASAWISQRTPSIWDDPNRGKLPLMWCISPVLAERVPHIMHNFRTTATENDYFAAADNGAGYIMPGMLQEPRESGLPSGLETWGKHCKKYYKKWGLSITGFVIDGHAPGLNKEGLDCYASFSPNGIVPQKIATALLHGNMPVIRADLDINDGDPKVAAKRIVERVKERSALPFHWFRNILKQPTWYCEVMNEVKAQDDSIVLLDAPAFFELLRIYLKEHGSVIEMEKWIKKIMQFGGLFLFMSCNQPVDVVTIDLSREEAEIPPSLYGIFFEEITHSGDGGLYAEMIRNRGFEDGTLPSGTVLKDGKAVAKPLHCYSNDSINHFSIAWNDSLFMESWEVKCVSDTRPPFYEITEVKPLNNATPHALFIDLGASASDVWVVNDGYWGIAVTEGQRYNFQFYLFTEELKNTVVTAALLDCEEQIVVSKNFQIERDGSWNHYEGAFTVDTTANDLRFALLLPHKGKVYIDFVSMFPENTFCGHKNGLREDVAGMLRDLRPDFVRWPGGCIVEGLTMDNRIKWKETIGDIVKRPGEYNLWGYRSTYGFGYHEFLQFCEDIDADGLFVCNAGMSCLFRNGDYWEEENRIDNLIQDALDAVEYALGDTTTVYGKRRAENGHAAPFPLKYVEVGNENVGLRYVKNYNRFYKAIKEKYPQIEVVCALMFSPYIQEAEKIDILDPHYYETAGWFYNNADVYDKLPDDIPYKIYVGEYAAIGRPSLYSSLAEAAYLTGVERNADKVQMVSYAPLIENAAHGKDHLLVLKNDSVYGRTNYYVLKMFSENRPDVNLHTDLKPASPEPVFRTNGFIGLGTNNTEAQFKDLKVIVNGEEIYTSGWSDFVDKWTIIRGDWKMEGNLLSQSQKGIDALAILEDREFDDCTIELKAKKISGTEGFRIVFGGTDSNNYFMADIGSHTNESVIFREVNNEGPISLFDYRNTASIKTDQWYTVRIEIEGAHWKCFLNDELQYEYTYAPKKKHYVVSGYDRERKEVIVKLVNAEAGNWKVRLQLDKAKNLASKGTKIVLGADDRFDENSFSDPLKIVPNVTELSGISSEFTIDCQANSLTVLRIPCEKMKRGILFLLLTTFWGVFVEAGNNKEVPVSNLRVPAYPLVTIDPYISAWSHTDKLYEDEVRHWTGTEHSLTGVLRVDGKCYRFMGKGEQALTSILKDARDEEWTAKYTNTMPYADWYTKEYNDTEWQEGAGAFGSVDMPHVKTEWNQGDIWIRRKFSIEDKNISKKRLYLVYSHDDVFELYLNGQMLVSTGYKWRNYVVQPLEAEQVKSLTAENNLIAAHCHNTKGGAYVDFGLFTDDEMESFFGTEAEQIKVSVLPTQTYYSFYCGPVQLDLKFTSPLVLNDLDLLSSPVNYISYEVRSLDKRAHDVQIYFSATPRWAVNSLDQEVSVENYRSSDIHILKTGTLEQNVLGKSGDIICIDWGYFYLAGNLSESSDMSVGTPRSIQESFAGKGILLDTKISRTSVRLDKEEILLAYSENLGNVRERKSEGYLMIGYDDIASVQYFGKNLKAYWKKKYPTMEAALADARKNYKKTMQRCDEWDYKVMKDAVEAGGQQYAELCAASYRQAISAHKLVCGPAGELFFFSKENNSNGSIGTVDVTYPSCPIFIRYNTEIMKAMLDFIFDYSESGRWKKPFAAHDVGTYPLANGQTYQGDMPVEETGNMLIMTTAIAIADGNADYAAKHWEILTAWSNYLAEAGMDPENQLCTEDFAGHLAHNANLSAKAIMAIAGYGRLAEMLNKPEEAKKFTEMAKRMAIEWERRADDGDHYRLAFDMPGTWSQKYNFVWDKVLGLNILPDRIMKKEVTFYLKTQNKYGLPLDNRFTWGKTDDTVWSATMADSEGDFQELIRPIWKYVNETSSRVPLGDWYETLNADYINFRARSVVGGVFMKSLDHYLRNKRKMGMNKFFLFLLLSFLVAAKPAYAGDIRIPAKGGGLYQVVIVDKGTEGAKYDGKTESIINTSSGTRIRIRDIDFGDARHGLYNRFMVEYTHPGDCEDGFFDIYIEDTAVPVASIPVEQTKEGEYKEASAPLSVNITGSHAVYVRWRNHSACLKTFGANELVPFASVELIRTGSLTKYEFGKGTLGELSGKHRLKMVWRGNSANVANVYLDKSDVVSVMDIEEEKLIVVGGKLGFRINSATPIRNVEVYSPEGLKVKELRLSDCSAFVSVAPGFYIVRITRGNGGAVVKKILVTEMSQAAPLTNGDIDSPSQDAMILPMEESKVSVVYDPKTSVVFTDEGIKGTSDGLTLDLGEIDFGSGDYARVWVEMANVMKPTEQTGFDFYLDDMLLEPKTDFTIAQELPHLDSYESDKQPQEGLFFKNQNVPLSQISVIDVRGDDSYGKITAAVAQGVLNQSNAEVYLVYEDHHQTQFEDVYGKQGETWNLLRGNYSEEKYAGLATLVDKYKDRFKKMVLWDPDKEWTWCLAQMICAQQKGIPVTKEIKEFFNNELDWNIECEDISNNWATKLEAYQWAIDNLADGCHKSLSFSAGLRSDYVSNPWKIYDYAAASKGFVFFLSDSDPDEFAMIQKICDKMDYQPGSSTMGYGAGKDGDALNNATNPYNVGFMVSDYYANGSFWCSFPRKAFQQRKGQAIEALPGKIYVSLIWSDGDNVQFDSNQMYNMFKNAPGRGKVPVGMTMAASLQELNPVLLEYFYKNLTPNDELVAGPSGFQFIYGDKYNENNYEKWLETNQKWLETAGFHTACLWNTTNKERFGRYMQTCGLQGVFDGFENNKERYEVGKDGEGVVCILQGAHCWEEGDVYKDLISVKPNGQKPVFRNVYLIAASYGGVGGYERLIRELQRVESYLPNTYEFLLPMDLCATLKEYIEKNGGNGHEMKRLYYIFGLSALLLSSCNYFEYDNYEAPNSGLEGTVVDRKTNEPLQAEAANSYKVEYYELSWEEAGHANTQSRFFWGKADGTFLNTKIFAGKYRITLKEGAFYAPEPEVVYLKENRLTRLDYSVIPYARVNIDEITLTGSKQNNLEIKYTIEDTEKEVNTEGLDEGLYTLSEAQVFISSKSPNVGVNNSETKYTIRAKKEFERGDYEPGVPFQVVEKNVRNLDPGKYWVRIGVRTANPQKRYNFSTIKEIVVPVMRINKILVSALVMALSFYSCDYLDVPPINIIQDDAIFNSESGITSYMTTLYYDLPIEDFRYTQQGFNVSGKGQGRLPNVSGEAMCSSSDDISTIGDGTWWGCWDYGKIRRVNYFLKNFPAYKSNFQNTVLADAWMGEAHFIRAYCYFAMVKRYGGVPILREPQEYVGDIESLKVPRDTEKACYDFIAEDLDEAFRLLPDNEEILGKGRATKYAALALKSRAMLYAGSIARYGTVDLNGLVGIDKALANDYFELAYKAVKELEKSKRFSLYRKNSDKEKNFAELFLAEDSPENIFCKYFQRNVNAHGWDVYFVPYQYRGNGFSSNMNPTLEFVEMFEHKDGTPANFAERAKNTYFDDPSELFQNMDARFGGSIIYPNAIFKGEPCSIQKGLIIEDGSKKENATNYEEAVYTANDGQVYHIVGKSGSGNYSGNMTGFFMRKYLNENMPQSEVIENYSEQHWIEFRYAEALLNGAEAAVEMGQHLDDALLWINDIRSRADIKQLSLSDLTVDKVRHERRIELAFENHTYWDLRRWRIADKEIETKQYTGLCPYFDINKQKYIFEEVAANKYYYTFDVKMYYERIPDGEIAKNEKLKQNPYYNMKKNNFFYMEKAVSMLSHYSHSFLFLFFVVVGCATVLAENDQQQKISGVVRDQSGEPLPGVNVVVVGTNTGTMSNIDGIFNLNVSGDKLDKAELKFSLIGFASKNVALKGKTVVNVTLSEDDQILDEVVVVGYGTQKKATLTGAVSTIGTDELTVTPTSNVQNMLAGKLPGVRIQQRTGEPGSYDAKMDIRGLGTPLVVIDGVVREVSDFQRLEANDIESVSVLKDASAAIYGMRASNGVLLVTTRKGESGKTRIDYTGSFGFQNPSGLPDVLDAAQYAELVREADKNMGRGINTTFTEEDVARFRREGGTDWYDLAMKNLVPQTHHNVTASGSGKRTQYFLSFGYYGEDGIWKTGDLNYHRYNIRSNLSFDVTKDLKAELLIGAMSDEKNQPYKDTWEQFKAIWMLKPTETPYANNNESFPNDVMYGLNPLMITDADQSGYKRRINRTLNTTFTLTYKAPFLKGLSAKFLYAYDYKNYQQKEFQKQYTLYKYDREKDVYNSQIYSSPSSIYRKSWEGAQNQLQASLNYERLFAEKHNLKVLFLYEQSAKEEDNLWAKRNFEMDAVDEIFAGSEEEQIGNADAGQIYRVTNMGLVGRVNYDYQSKYLAEVSFRYDGSSKFAKGHRWGFFPSASVGYRISEESFIKEFAPLSFITNWKLRASYGAMGDDGSSSYQYLSGYDYPGASYVFGDVVYKGLGFRGLPNELITWYKSKTLNVGTDLDLWNGMLSAQVDFFWRYRDGLLGKRSGEVPGTIGAELPEENLNQDLYKGFEIVLGHRNKINDFNYSVSLNFALTRRQNRHLEEGDAVNSYDRWRNKYSNRYSDMGWAYGSNGQFTSMEDIWRSPIQDGQGGATQLPGDWKYEDWNGDGIIDDNDVYPNVYEHTNDNGNPKMTFGATIAAEWKGFDVNLLFQGGGGFNVIYFEQLQYPLCFGGNGLAHFYDRYRQDENGNWIPGKWPTTRDAGSYSVNYARCKQTTYDASYLRLKSVEIGYTIPQHITRKFKVDRLRIFANGYNLFTLSNLDFVDPEHPEGNYGYLYPIMRNFNFGLNLSFMEKNDYKKIVASCFCSMMLVSSVWAQESDLYAGGTGSKSDPYLIETEAQFDAVRENRGSYFKLMADLDFASYEKEGGWWPLGEWGSGDGSDQRFSGTFDGNGHKISNLMAKHGDDTGAHDMSVFGVVDGGTIRNLLLDNVTVIGGGRLGILTGLTRNATIEQVGVINSSCSNIGTGSNSSGLVGPCAGTTVITDCYTADCNVMAKSTDGETGDAVGGIVSSGNATVMYCYSTSTIEGKTNVGGIVGANDGGAVISCLSLNKDIIGEVEVTHRVVGKRNGGDVSDNYAHSSVLLNGQAVTEGTGIDTDNGETVEELTESFYADDMGWDFDEIWTIDPTISPYPVFKWQTSTSGVTNVEKAAYNVYVTTDGIRAEGLNGNEMIYVYTTNGVLVAKQIAENTIENISLTGKGIYVVNIVSTGASQAFKVVKMKKEPLIVFISILFLLVSCRVKDENIESAIFAPVNYVDPYIGTGGHGHTFLGVAAPFGAVQIGPNNINKGWDWCSGYHYSDSIVIGFSHLHLNGTGCSDTGDLLFMPYTGKMRTQPGTQDNPLSGYASYYSKSDETALPGYYGVVLKTHRTKVELTASDRVAFHRYTFPKNVEKYVMINLKDANGDDRPTDTYLEQVNDTTVSGYRCSSGWSKQQQIYFTAVFSEPIRLALFHDSIPVQGNVLQGIDVKGNVIVASDVEKLDVKVGISPVSMENAAANIRQEIADWNFERVVDETTAKWNAELSKLQVSTTDTVAKRIFYTALYHAFIQPAMFNDCNKEYRGTDKNVYGDPGFTNYTVFSLWDTYRAAHPLYTLVQPERVPDFINSMLAIYEQQGRLPVWHLYGSDTNEMIGIQSVPVIADAILKNMKGFNYERAYQAMKASMMSDYKGLSYVTKLEYIPADKEKESVAKGLEYAIADWGVAQVARKLGKVDDYEYFSKRALAYQKYWDKDTRFFRGKNQDGSWLTPFNPVHSTHRNDAYCEGNGWQYTWLVPHDVEGLISLLGGDDAFVSKLDSLFSVNADLGDAASPDISGLIGQYAHGNEPGHHTVYLYSYAGLQWKTAEKVDYILSQMYHDSPDGLQGNEDCGQMSSWYVFSSLGFYPVNPSNGIYVFGRPIFDKVALKLPENKVFEIRTVNNSRENKYIQSVQLNGRPYDKSYISHADIVNGGTLVITMGNKPNKDFGANMDCRPKSAIKMMKRVLIYGVLFWVLGCYKAASQEAIGLYDLHYTLETDLSTPKGRNVAWDDVHVVSALQGIVNRDAPQLYVFFVDRDQLDIDKYWLNKYRRKGQWLYQKETVTYNTIEDLVSAYAGYIKGVVLYDERVPSTSNVASAVAGAEDLLPIRYDLDSESLYSRLVLGGPRLKVKRRLINEDGSVMFTGSGVIPGTNRNSTGSIKNDPYIWYIENYMKTGKCNTEYAAYYLDQYWKQNPGATVRNHHTLSNHDFFISKRAFFFDLSPWGDEPATDEPTQKVGTDLATLKEMLLLAYQQNKGEKYCYIGGFPSWAFKYTKHAGGIHDDVPTEWEFLRLISAYNAFKDADAIAIGALANASFWQHFPLEERYSQPWVTHEELKQRGLLTEDGKVDVKGRNFLIFYVGDYDASSWVSQFTSLTWDDPNRGKVPMMWAISPVLQERVPHVLHNFRKTATKNDYFVASDNGAGYLSPGMLQEPRPISGLPSGLQSWAEHCKPYYEKWGLSITGFIVDGYAPGLNWEGMECYRSFSPNGIVPQKLSSWSMLFGNMPVLRADYDINDVEPKDAAVAIVNRIREREGLPFHWFRNIIKSPTWYVEVVEELKKIDDSICLLDAPSFFELLRIYLKETAPFAGGTGSREDPFLISTPQQFDHIREYRGQCFRLINDLDFSDYVREDGQSWWPLGEWGSGDNAMERFRGFFDGGGYSIRNLSVERKAHDLSIFGVTEGAEIINLKVENCSIIGEGRLGVLTGATFSTKIEQVDILDSQCENRLSDHGSNAGGLTGPLYRSVVKNCSVKGGNVYAKDCAGGISSSMSEDSEIIDCYSTCRIEGITNVGGITGKVNMKKVSLLVFLSVLLISCGGKEVLFTSFSPVDYVNPLVGTQSKFTLSTGNTYPAVALPWGMNFWTPQTGDMGNGWAYCYTDDKIKGFKQTHQPSPWINDYGQFALMPVTGGKKFLQNERGSWFSHKAETARPYYYSVYLADHDVKTEITPTERSAYFRFTFPESEESYIVVDAFDNGSFVQIDEENGTVTGYTTKNSGGVPDNFRNYFVMKFDKPFASAEVWSGDKIIKGKREVEDNHVGAVLGFKTYKGEKIGVKVSSSFISEEQAWLNLEELDSRNFNEVKESARNAWNDVMNRVRVEEGTDEQLRTFYSCLYRSLLFPRKFYEVDKYGNIVHYSPYNGEVRRGYMYTDTGFWDTFRALFPFLNLMYPSVNKEIQEGLANSYEESGFLPEWASPGHRHCMVGNNSASVVADAYLKGCQAEKIDLLYEAVLHGANHVHPQVPSTGRLGYEYYNQKGYVPYNVGINENVARTLEYAYDDWCIMRLAQQLNRPQEEIDLYRERSKNYRFVFDKENNLMRGKNEDGTFQSPFSPYKWGDAFTEGNSWHYTWSVFHDVQGLIDLMGGKENFVSMLDSVFVVPPIYDDSYYGQCIHEIKEMQIMNMGNYAHGNQPIQHMIYLYNYAGQPWKAQYWLREVMDKLYTPYPDGYCGDEDNGQTSAWYIFSALGFYPVCPGSGEYVMGAPLFKKAILTLENGKQIVLNAPDNTNENRYIRSLKMNGKEYNHNWLKHEELMDGAVLDFDMSHTPNTERGINDEDFPYSLTNEDKMERYEAITLTSIALFERIVFILIVEWFPLLLILLCRPLSYENCMMRSIIVLSLALLLVACKYEKEYSGNPIVEGWYADPEGVVFDDEYWIYPTLSDIPFGVDSADFPRLQKETRAIHQVYNIQTYMDAFSSKDMVHWTKHPKVLSVENIKWLEFALWAPSIVRANGKYYLFFGGNDIQNDEQYGGIGVAVADNPAGPFKDVLGKPLIDKIVNGAQPIDQFVFKDDDGSYYMYYGGWHHCNMVKLSSDLLSLVPFDDGSYYKSVTPENYVEGPFMLKRNNKYYFMWSEGSWGGSDYSVAYAIADSPFGPFERIGKILQQDESVGTGAGHHSVIQIPGKDEWYIVYHRHPLGDTIPNHREICIDRMYFDENGFIKPVKMTFDGVGVNRLTDMQKTLIFLLLMLALIPVEAQNISSGLYFAAHTSIKEERTSLILSPEFDASKGLTLDFDIKFRPEEHNYGYVFRIIIDDEKSFDLIANITPEKRALNLIEGNNVYLAFDEELLNQYSWNKWAHIQCSIYPDSLRLIFDNQTLQGQYKSINIKNVKFYFGYSDHEKFHSSDVPPMSIRNIKITDNKNKTIAYWPLKEHLSYSCLDSLYQIPATVTNPTWEINKHTKWVKEKTLALPIYTQICHAPSKGNIYFANSSFVLVYSTIDNTLDTIYPAHGAPYTEINNQLIYQPYYDELWSYDFDPLKQMSIFNFNDNTWTKNDREIKNPEYSQHNTFISPNDSCLYIFGGYGNYQYKNLILKKGRTQDDWIPVSYNEEIPPRYLSGSDYKNRDTILVFGGCGNPQGKQELGVINYYDLYAIDINTFKTKKLWTIPNDTKNFVVGNHIVTDETNNKLYALCFPNDCSNSYILLKSFDLTDGNNCTNYADTIPFSFNDVNSFCTLYYDSLQSRLYAVTNYNYNNKSNINIYSLAYPPLKIEDTLQTVAGHKARVTKIGFFIGIGICIIAGMGCMYLCYRKKKRRRKESHIPHNPPVVTNTDRSSKTTTQDENYKPQPDIHKKSSILFLDGFQVWDKNGADITKSFTPILKQLLILIILYSVNNKKGISNVTLRELLWFDKTDESAQNNRRVNIRKLKLLLEKLDGVELVKESTYWALKFTHAYCDYIDVCNWIDKVKNKESITAENINDLPLNLLSGQLLPYVQTDWLDSFKSDYTNSVLDMAINLSKQEYIKGNNELLIQIANSMFAHDKTDEYALILKCNTLYKQGRTSLAKTTFDTFCNEYKAMLNTNYTKTFNEVINCQLMDVHRDRSIIVHVYIYIGLSLKYKKYTPKKFYILNISQNRSLLSLVNIKLLNLLNNNLLLQERTIPTATLHLHIDKMKQFIRYTILCVGYILGSQSLLYAETPTDSINTIPTDSIIAKKDTTVKKLNIFQKVLKYFDDSNAPRPDKKFDFGIIGGPHYSSTTKLGIGLAASGTYRLRRDSITQLSNVSLYGDATTTGFLLIGVKGNNIFPKNKFRIDYDFYLYTFPSDFWGIGYENGNNNANKSSYDRLETILRIDWLARLHKDLYGGISTGFNWVKGSDFTKIELLEGEAREVISTSIGATLVYDSRDFITNAAKGVYIKVNQRFFPKFLGNKKAFTRTDFIFDYYHRLWEGAILAFDLHGEFNYGDVPWNMLAALGGSARMRGYYEGRYRDKNLIETQIELRQHIWRRNGIAVWVGAGNVFPSFSGFKWGHTLPNYGIGYRWEFKNRVNVRLDYGFGKKGQSGFLFNINEAFMKHFNQIFTQRRIFWIFSGIMLVPNIFLCFTEQLPLLFKVSYILIPGALYLLLLILSRKPGITFWALFPLHFIGAFQLVLLYLFGNSIIASDMFLNMFTTNSGEAFELLDKLAPAVVGVFLLYLPALALAVYSIRRTETLTPLFQKRVFMLAMLMIGSGILVYTPAHRKYPHTARLDNLYPINAFNNARFAVDSWEAAKNYPRTSRKFDYRATSTRDTELPEIYIFVIGETSRAGNWGLYGYERNTTPKLDAMPDVIHFDDVLTQINATHKSVPLMLCPADALNYNEIYRQKSLISAFKQAGFHTSFLSNQLRNGSFTEFFADEADCTIYFAAPKNKPHLHDDVLLSAVDSLLNIGKTKQLIILHTYGSHFNYCERYDTDCRIFTPDHIKEIDHKNKQAMINAYDNSIVATDKFLAQVIDKLDRTGETSAMLYLSDHGEDLLDDERNRFLHASPIPTYYQLHIPFVIWFSDNYSTLFPDDIRQARNRHTTPFDSRVVFHTLLGIGGIETEYRDDRLSLISPSFHLEKRYYVGEQNIPIPVRRLPLEEEDLQAFERYGISPRMVCSETLFAKIFIILNNTSILSYYLYCIYAILTNLELISLKLIMKKNLITFCFLLLLFVPFGTKAHLIAPRNASEKTTVIPASRISSPKGLTKVLENTVDGTTLYGNLIFAQSWGNDSSPMGIYKFNTTNNPKAELVYRPEAGPIGANGGATLVDAKYFYCITYTKLSGTTISNELICYDIESWTEVSRKAIPLTTISTDMTWNPADQKVYGAFYNTTKNGYVFGTLDLETGAVNKLSDITLQDDKGYPAGFVVIAANSIGEVYGISQMGDLYKFNTEDGSYSLIGATGYTPLYQQSGCFDFTTKQLYWAACNENSSGIYQVNTDTGEATLLGSFNDLEEFVGLYSLSPNADLEGPGSVTDIDIAFEGAALSGTITFKLPTTTVSGNKLSGDINYTVEIDDETLSSGTSTAGSLVELPITLSEGNHTLEITTNTIHGTGPAYKASFYVGTDTPATVTGITVNRESDNVTVAWEAVTKGQHGGYVDISLLTYNVIRKPDNKIIATRTTETTVTDTELPLILGEYTYEIIVSDGTRQSDPALSDGIMLGSYLEPPYNHSFKSMDSFYQYTIINANEDDKAWTATVNGAQLNYSRTLAADDWIVSPAMKLKAGFLYTLILKGRSSSATYKERFEVKYGTEATADALTNVIIEPNFFTTSKEETFQAVFSPQSDGTYYIGIHGISDKYMGSLYIYSIEITEPINALAPAATDEMNAVAAPEGALGATISATAPSKRADGSNLTTIAKAEIWNKTKERLVGSIDNPQPGSEVSITDTQAANGFNTYSIAFFNEAGKGYETECNVYIGIDIPTAVINPHVVQAGDKAVLTWEAPVTGINGGYIDPEKLTYQISQLQPMSVSTATEITGLTYTDESLNADSGQMLLSYQISAKSIAGEGEATPTNSILFGTPYPAPFTESWPEGKTENDPWAIDIVEKGYGDWSVTQTSFSTILGAQDGDDGWISFSGPGSYRLVSPKINVATLENPVLKIWVNNPDGLSEIHIQASVDLGTNWTTLLEINSADNNIWKCHAIDLSNYRNADFLQIGILGATEDWGAESVMIDNLRIFDQLANDLVLNGFTGPESVIGAKPADYSVKIYNDGTNEATDYKVCIYSGDKLIAEQNGKPIRSDAYETFDFVLSSPVNSTVFDLTAKIEFDGDLDTDNNSAALSVAVERPKYPTIDNLSAEDNDNSVSLTWSRPALSCIPDPATDDIESYEEWSIGGIDDSNRTGTIGDYTVYDNDGQTTAKINAWAPQYPNSEAKMAFQVMSTNSESLSQQLTFYGLTAHSGKQLFACWSTMGGAANDDYLIFPELKDGNRSISFWARSIPFMYGGEGYDKFEIVYSTGNNDIDNFVILEGSETIVPDGLERDPENGYNKYSFELPDNAKYVAIHCISSGKIGLLIDDIEFIAANMPDETLVLNGYNLYRNGELYKQLPATEGYTDTEIEKGNIYTYNVTAVFDKGESPYSNTVTVDRSQSGIDEASGNPIKVYAADHTIVIENVDNRQAEIFKIDGSKIFDEIISYKDRIHVETGIYIVRIDGKSFKVTVRMDSTALSRSDSIVLIPTYNEKENIAAIIHAVFELPRQFHILIIDDNSPDGTGAIVKDLQKQFPGALHLMERTGKQGLGTAYIAGFKWAIEHRYEYIFEMDADFSHNPKDLMNLLAACKTGGADMAIGSRYVTGVNVVNWPMGRVMMSYFASKYVRFVTGMKIHDTTAGFVCYRRRVLETIGLDSIRFKGYAFQIEMKFTTYKYGFTIKEVPIIFINRVLGESKMNTSIFGEAVFGVIRLKINSWFRKYPKKRNMCRTIITNGTIVNDGEHFIGSIIVKGEFIESVIKGKLPENIVYDTDRIIDASGKWILPGVIDDQVHFREPGLTHKAEIATESVAAVAGGITSFMEMPNTVPQTTTLEALEWKYSRAAEVSPANYSFYIGATNDNFEVLKQVDFSQVCGVKIFMGSSTGNMLVDSEKTLRRIFAEIPALIAVHCEQESIIQANKKYYTERFGEDLPIFFHPLIRSAEACYTSSAKAVELATRYDTRLHVLHLSTAREMSLFDNHKPLSEKHITGEVCVHHLWFDDNDYAQFGNRIKWNPAIKTCADRRALLDALRCGKLDVVATDHAPHLWSEKQGSCLKAASGGPLIQHSLQTMLELSLKGEFTIEQVVEKMCHAPATLYRIDRRGYLRSGHYADIVVVDPCKPYTVTTENILSKCKWSPFEGHTFPISIDRTFVNGNEVFSEGKVCNRTRGKRLTFHDNSTQNKNIMFFFESFYYFYSPKTKLFYNEMKHIRLIFSAILLSLVVPCGYAQTRQDSLAIAHAQWHTDTLKHGAVCMYTNIHVFDSPQQISIIKYDPKKYKTQIVQAPQMTMTSHLAKENQAEAAINGSYFNVKTGAPTTFIRLDGIVRGETTRAEAFRTDGAISTDKNKIKIHTFDSITSKKLGKKYKNILAAGPLLLKNGVRQMAPTFPENTGKATKGNAHSSDVPQGFFKRHPRAFIGITPDNQIMMVVVDGRFKKHSVGMSIDELSYLAKQLGMRDALNLDGGGSSTLWNNKTGIVNHPYDNKKFDHEGEREVSNAILVIPNKMKTLLKTIGIVSTLIGSSFLFQNCSEKESIPEGIIPPTDSVSSKIEIKNFSIEAQIHTSPDSTVTMQGEGFLQSDTVALISETAANNTYALPLASVTKQSADIVMPKNIVSDTYQLWLKRETDSCRLGKTTLIIENAVDLNIPDIAGMTLKGVVYCENKPLPNVVVSDGYNVVQTDEQGRYYIQSDKKSGFVFISVPGNYEVAIKDNNQPVFFYRLAKDDSVEQHDFELTATDNTNHVLLALADMHLANRNNDLSQFKLRFLPDLNTTVEKYRSEGKKVYGLTLGDMTWDQYWYSNRYDLSKYLITIKSVDLPIFNCTGNHDNNPYCADDWQAEQAYKDIIGPTYYSFNLGNVHYIVLDNIQYINTGASQGTIGKRNYNKKLTEDQLSWLKKDLATVTDKNAPLFVAMHAQLYANPTSLPQKNTISMSGGSTLVNYLKEFTNAHVITGHTHINYTIEPSDQLIEHNIAAVCATWWWTGKNGYANNHICKDGSPGGYKIFSINDNDVKWLYKGIKEEESKQFRSYDLNQCHITAEAFAPESTEAEMGAYSDTYGTKNNKNEILVNVWGYDPEWKVEMTENGKPLEVKRVVAKDPLHIISYEAKRLNVGATPTADFVSCATAHMFKATASNATSTIEIKVTDRFGNTYSETMNRPKSLSCSMKMKQFAKKSLVLFIALFFTAALSAKTPKYIFYCIGDGMSFAHVMATQLFYENGNYEDGNESLVFLDFPVRSAIRTYANNSLITCSAAAGTALATGHKTNLAHIGIGPDKQPLTSVAKQLRDKGYAIGIITSGQLDDATPAAFYAGQMRNDTYQIGKKGADSQFDFLAGSTLMKPFNRRDPSQPYIYDYYRQKGYTVCRGPEGYNSQKNADKILLVDTDTTLKKWLPYVIEREPGKLGLEFMVQAGIEKLYKKKNKKGFFMMIEGASIDHASHPRDIATAIKETIEFDRSVRLAYEFYKKHPDETLIIVTADHETGGLTIGETTTHPFNWEYVNYQKMSKESLSKLFQKMRETGEIDTWEKTKKILAENTGLWDKIPVNAGEEAQLMQCYYETIVKKSSKQEITLYAKSEPLVADAIALLNKKIGVGWTSFSHTGGFVPFYAIGCQARQFGALNDNIEIPNTIRKIMKIKMKTEFQKCMDGEIFDGKDKELAEMTLKTKRLLVKLNSTDYADTKQKEAILREMFGHLGENVHVDIDFRCEYGKNIFVGNKVIINMNCTFVDNNRIEIGNNVLIASNVQIYTATHSTNVKERTMQNWDESKAICNTFALPIKIEDNVWIGGGAIILPGVTIGRNSVIGAGSVVTRSIPADCVAVGNPCRVIKHMNNEPDMKKLVLFFAVAFAMSFASCGNKAAESTEATDSVAVVEEVAVEVVDTVAADSVAVDSAAVAEMIPENFIKLYESSFRENWDLPALTDYNEQRTLTYEDMAREIAKLHILFRHCQIRRGDKIALVGKNTSNWCIAFMATVSYGAILVPILQEFNPHDIHHIINHSDSVLLFVGDHIWENIEMEKLPEVRAAISLQDFSCLVQRDGEEIAKCLREMKRKFKATYPNGFNREDIKYADLDNDKVILINYTSGTTGFSKGVMLTGNNLAGNVMFGVRSHLHYKGSKCISFLPLAHAYGCAFDLLVPLAVGTHITLLGKIPSPKILLKALEEIRPNLIICVPLILEKIYKKQIQPLLNKTPMRWALNIPILDSRIYGQVRKKLIDAFGGRFEEVIVGGAPINREVETFLHKIKFPFTVGYGMTECAPLISYTPHREFRPGSSGRTLFGYVETKIDSLDPENIPGEICVRGEHVMKGYYKNEEATKAVLDEDGWLHTGDMGTISADGTIFIKGRSKTMILTSNGQNIYPEEIEAKLNNMPFVMESLIVERDGKLVALVCPDYEAMDSYGVSNRDLPMAMEEVRNNLNKMLAPYEQITRIQLYPNEFEKTPKRSIKRYLYDNMFFILHHDRLNMIDVHTFENKTAAYYTLGCKLNFAETSTLGKILEENGIRKIRPGEKADICVVNTCSVTELADKKCRQTIRKIARQHPGAFIVVTGCYAQLKPEEISHIPDVDLILGAEQKLDILQYLGDLQKKQKGNIVTTPTKDIKKFSPSCSRGDRTRYFLKVQDGCDYFCTYCTIPFARGRSRSGTIEQLTEQAREVALSGGKEIVITGVNIGDFGKQTGETFLDLIESLDQIEGIEHYRISSIEPNLLTDDIISFVARSKRFAPHFHIPLQSGSDTVLKLMHRHYDTDLFARKIETIREKIPDAFIGVDLITGVRGETEELFEESRRFVASLDISQLHVFTYSERPGTQALKINPVVPVPERHERCRRMLEISEKKLHDFYYKFQGTIRPVLFEQPRKGAPMHGFTDNYIRVEMPYRKEWVNTCRPVKLGEFNESGDALLAIEIMKKETLQNIVYSPLYLWFKLHAILPMRILYILSDILYFPLYYIVHYRRKLVSENLRKAFPDKTDKELKQLEQKFYHHFCDYIVETIKLMHISDEEMRRRMKFEQVEIIDRLFEENRSIIILLGHFGNWEWVPSVTLWTRTPDVMFAQIYRPLKNKWFDRFFLKLRSRFGSVCIAKQDTLRAILQMKRSGKPSITGFMSDQTPSPTNIHHWARFLSQDSPVLTGFEKIARKTDFAVLYFDVEIVKRGYYKTTIREIALRPNELPEFEITDRYTAIMEKTILRNPWAWLWTHKRWKYKHEDFPGTMKKIAVIILNWNGEDLLRKFLPSVCAHTNANIADVIVVDNGSDDNSVEVLKQEFPQVKTLLFPQNYGFAAGYNKALEMLDYKYAVLLNSDVETTPHWLEPLLEFAEGNLDVAACQPKIKSLRKREEFEYAGAAGGFIDRYGYPFCRGRIFNTLETDRGQYDDICDIFWASGAALFVRSEIYKKVGGLDPSFFAHMEEIDLCWRIHLAGYRIAVVPQSTVYHLGGASLDAANPRKTYLNFRNNLLMLHKNLPCKEGKKTLFVRRLYDTLAFVRFALLGQFSHARAILRAHNDFRQMRKRYTEFPNTDLLKTFPESGRNITIDYFLKGKKRFRMFDVEKIREDFPILSREISGRPLIYLDNGATSQTPKCVVDHIADTYYRVNANVHRGVHTLSQEATDAHEAARCRVQQFIGAGSSSEIIFTRGTTEAINLVASSFGDEFLHDGDEVILTVMEHHANIVPWQLLQRRRNIKLRVVPIDERGDLNVDTYKSLFNEHTRLVGVAHVSNVLGTINPVREMIAYAHAQGVPVLVDGAQAVPHLRVNVQELDADFYVFSAHKVYGPTGIGVLYGKEKWLDAMPPYQGGGEMIAHVDFSGTTFGELPFKFEAGTPDYVGTSAFATALDYVDHIGLESIAAHENELLRYTTDRLQDIEGLRIFGTSEHKSSVISFLVDGIHHYDMGMLLDKLGVAVRTGHHCAQPLMTSLGIEGTVRASFAAYNTKAEAEAFVAAVKRVVQMFRMGAVQQYIDLYRSQKDLINGHSSAVMNGLREEAVSLLESRGLPSLKDEEHRRTDIESVYSPDYGLNLGRIDIETNPYEVFRCDVPNLSTLLYFVVNDSFYKRVQPVSSKLPDGVLVGSLCDMSLQYPDLVSRYYGKVADMKRDGTVALNTAFAQDGFFLYIPDGVVVEKPIQLVNILRGNVDFMVNRRLLIVVGKRAQAKLLVCDHSDEAAVKFLSSQVCEIFVDDDAVFDYYDIEESSENTSKVSSVFVRQGERSNVLVNGIVLHNGVTRNNYYSAFEGEHAELSLCGMAIADKGQVVDTYTHIDHAVPHCHSNELFKYVLNDSARGSFSGRILVRHGAQKTEAYQSNKNLCASPLAKMYTKPQLEIYADDVKCSHGATVGQLDQNALFYMRSRGIPEPEARMLLMFAFTNDVIELVRLDALKDRLRQLVEKRFRGELAKCSGCQACHMLKIEDLHASINGKEILKGINLEVKPGEVHAIMGPNGSGKSTLSAVLTGNPAYEVTRGSVEFYGKDLLALSPEDRSHEGIFLSFQYPVEIPGVSMVNFMRTAVNEQRKYRGLEPLSATDFLKLMREKREIVELDNKLAGRSVNEGFSGGEKKRNEIFQMAMLEPRLSILDETDSGLDIDALRIVAGGVNKLKSEKNATIVITHYQRLLDYIAPDFVHVLYKGRIVKSGGPELALELEERGYDWIKKELGEIMKRIAYRFFLIVLLSVLAVEVFPVSAQEGSWFDEGNYDEEWLDKNFDNDVMIISTPEEFAAFGEYMTRSLWNYPNKTVRLAADMDMSAHIWETPSIKNYFRGVFDGDGHKISGLTIVPHMGGGGYSDDYFYVLSGLFGSVRGTSEIRNLELDETCRIACAKEYDFFFGDLEFQIGTIAASAIGDVRFSHCVNRADVVFTPWLQKTDSHEMVCSVSGLVAHADGATIDHCSNDGEIIVDIGEHSDLTDVWVSGLVGRSRSVYEKGGSLISSVNEGNISVSNAKGDIFVGGLSSNYTFRIDSCENHSVVKVNAREGSAYVGGVSSASMGITYSFNRDSVICESDGFEVQVGGVCSYSFYNSSQTDSLYTCGNEGEIEVKSNGSMLSVGGVMGQNTDCPVVDCWNRGGLKIESSAPRSSSRWNAIYAGGLVGYCEEPVYNSYNRGNISLIDAHIDVEGSSQGSVGGLVGKAYKLLWNSYSTGDVYSDVASVKVCRLSESNVHSCYYNSDAVVEGTEVGENGIAYSTAEMQSAGSGFLDALNNAVKGDAVCRNWEYFPGENDGYPVHIDRIVDGVDSPADHSVGRVYAANGRLFVQSDRSMQLSVYKVTGQIVKIMNVVEGLNTDYLPCGVYVVAGQVVAVTAGNKMKQDNSNEILNDVTTNDYKYGFVTDIETDIIPTGLNEDIIRHISKKKKEPEWLLEFRLKAYAYWKTLEMPHWAHLNIPDIDYQAISYYAAPKTKEAPKSLDEVDPELRKTFDKLGISLEEQMKLSGIAVDAVMDSVSVRTTFREKLAELGVIFCSFSEAVKDYPDLVKRYLGSVVSYRDNFFAALNSAVFSDGSFVYIPKGVRCPMELSTYFRINAANTGQFERTLIVADDDSYVSYLEGCTAPMRDENQLHAAIVEIVVHDRAEVKYSTVQNWYPGDKDGKGGIYNFVTKRGMCKGDHSKLSWTQVETGSAITWKYPSCVLAGDHSVGEFYSVAVTNNYQQADTGTKMIHIGKNTRSTIVSKGISAGRSQNSYRGLVKVLPSAENARNFTQCDSLLLSSDCGAHTFPYMEILNDSAVVEHEATTSKINEDQIFYCNQRGIPTEDAVGLIVNGYAKEVMNKLPMEFAVEAQKLLQISLEGSVGMNYVDFTILLIAVIGFLYGLIKGVIRQVGSLGGFIAGIVVARFFGGSFSALLREMFDLPEGVSRVIAYSLLFLIVYIICVQLMRLIHHITHHVALGWLDRLAGALFGAVKYLVILSIVLNLVHIIDPKGKLIPEKETASSQFYGYTLRVAPLLFSMAQEQFVSETKPTRGLFIPYSICNEPYLCCENCKADMSIRLNKVARDLNVGIQTAVEFLQKKGFTVEANPNTKITDEQYALLVKEFSKDKNLKLESESISLERHKEKSKATSATESEEGNSSSAIKEEPKELKTIIPETQRPKVVGQIDLDALNRPKSSEHKKESPVEKKEPVKSEENKVEVKTKEEKPEPAVSAREEVKPAEEENKPVAEPKQEVGSQSQPEPQIVEPKVKEETVEQEVKEEKGVEESHEDEVFTINRPAFTSNINVVGKIDLDALNQQTRPKKKTKEEKRKERESKEKQRQESHKAAGGDDANQQGGERRKRQRISKEKVDISKSISSMGGQPSRGGNGKNNGGNRPNKQKQRPIKAEVSEEDVQKQIKETLARLTNNTKGQKKSAKWRKEKREAFSNRERELAEMEEAESKVLKLTEFVTANDLASMMNVQVNEVIATCMSIGMMVSINQRLDAETINIVAEEFGFKTEYVSAEVVEAIHEEEDREEDLTSRPPVVTVMGHVDHGKTSLLDYIRNSNVIAGEAGGITQHIGAYNVKLEDGRRITFLDTPGHEAFTAMRARGAQMTDIAIIIVAADDNVMPQTVEAINHASAAGVPIVFAINKIDKPNANPDKIKEELANMNYLVEDWGGKYQSQEISAKKGTGVHELMEKVLLEAELLDLKANPNRRATGSIIESTLDKGRGYVATVLVQNGTLHKGDVVLAGTNHGKVKAMFNERNARIEVAGPSAPVQILGLNGAPQAGDVFHVMDTEQEAREIANKREQLQRELGLRTHKLLTLDDIGRRIAVGNFQELNLVVKGDVDGSVEALSDSLIKLSTPEIQINVLHKAVGQISESDITLAAASNAIIIGFQVRPSVAARRLAEKEGVDIRLYSIIYDAIEEVKSAMEGMLSPEIKEEILGTAEVLETYHITKVGTVAGCIVKEGKLKRSSKIRLIRDGIVIYSGDLGSLKRFKDDVKEVTTGFECGLNITNYNDVKIGDLVEAYEEVEVKKTLMAKKEEPVSMVDTFAEFKELKNIEITTMISVLEESFRNVLAKMFGTDENFDIIVNPTKGDFEIWRNREIVEDGAVTDSNLQVSLSEARKTDPDFEVGEEMTDEVHFEKFGRRAILNLRQTLASKILDLQKDAIYNRYKDKIGELVSAEVYQIWKKEMLLIDDDGNELLLPKAEQIPSDFYRKGETVRAVVLEVDNKNNNPKILVSRTSNEFLRRLFELEVPEIHDGLILIRAIARIPGERAKIAVESYDDRIDPVGACVGVKGSRIHGIVRELRNENIDVINYTANPSLFIQRALSPAKISSIRLNEEEKKAEVFLKPEEVSLAIGKGGLNIKLACMLTGYNIDVYRDIDEEEEEDIYLDEFSDEIDDWVIEALKGIGCATAKSVLALPRETLIEKADLEENTVDEVLAILKAEFEEMIDKKEIEAFVEEGLTGSDCFVVDVQVKPDNVIVVEIDNEEGVDIDRCVALHRFLESKLDRDVEDYELEVGSAGITSPFKVLGQYKKNIGKEVELLTKNGMKLSGILKSADSEKFVVTITKKVKSETSKRKVEVEEDLAFGYDEVKYTKYLIRFKMQRKKRGDIIAPSSIPTATKIAQYYIIRNSTDSLRTKIGMFVYRDEEFGEIYIRSDSRACRLIFRVKDNGLQITCPEGYAVNRVKSAVDDNREKLRVLVSRSVTIRKNRVLSTGDSIPCYGGDICLLPGVSNKFLFRYEGDCLQVFCPPGIDLNETNVRKTLSRGVGRFVYRRAQEVLPRRLNQISSRLGLPVVSVTIGRGRRKLGHCTRRGEIQLSFYLMYLPEELIDYVICHELAHLKYMDHSPLFHALCNRYCGGRELLLRKQLRSFAFLLYMNFAFFPASIFVVAKHLVRLRDAEGKRTYNAASNILFHICLMLWSETIFGEPVVNRFYRQFFSWGRAFLDSMENSWDRHEFMNTDNVKSQMRKGILEYCTLLILQKRRAYVSDIIQSLKEAKLIVVEGTLYPLLSRLKNSGLLTYVWEESTQGPPRKYYELTPEGTVFLNELDSAWKELNQVIDHIKEQMKKTVTVNLDKTIFNIDDDAYTVLESYLEALHDHFKKEEGGQEIMNDIESRISELFKERLGFGMQVITLQEVNEVIAIMGQPDEIENPLDSGTAPDNNADGDNSGQTTDTSNNESHKSTKRLYRDPDNRILGGVASGMGYYFGIDTVAIRVIMVLLLPLWASSVWIYLLLWICIPEARTTSQKLEMRGETPTVDNIKRAVEEEKENVSRNGGVANSIWRSIGSIFRGLFKFIFICIGGLIAISIIGALVTCIISILGFFFLGTATITTPFFSIFPGGMHVLNGHWELVVFTLSLFFTFGIPLYAILRAVLGSIFHWKAQSSALNIFLLVLWILSLVGLFVSTFIYIPEYPLLNLMRILLFGHTYQPSRSEQIRHVLQTLSRTEAELVAHGDFYDFLSKEFPDVCHRIGEIDCRSDYTADMALSIGGDGTFLRAAEKIGDRGIPVLGVNIGRLGFLADVPAEEVEPVLNEILEGKYKIEERSLLQVEFNGLSENFWPYALNEVAVLKQDTSSMISIHTTVGDSYLNTYQADGLIVATPTGSTAYSMSVGGPIIMPRAANWVISPVAPHSLTVRPLVVNDDMNITLRVDSRNHSYLLSLDGRSVMLDTDSQVVLRKAPFSIKVVKRLGHSFSATLRAKLMWGVDKREMILPEIPLLTPGMSVKQGLATMQMSGLSSLPIVDEGSYVGVVHEKELLRDDVAGKIGRENWRTPSVREESHLFDVVNQLAQYSDDILPVVTTDRRYVGAISIHSALVAVAHLCQTSSSGAIIELEIPREDYSATELTRLVEDNDCRVMNLMIRPDEKTGIWKACLRIDREDATPVLRSLERFDYRVVSCYQLHGVMDERIEQRIKELMYYLEMMRKEGAVRRKKQTDLFYPAHTFHYFCIIFTAKIIRITEIMYSVGLVSAKPSRKYDFRLPLHSPFTIFVNTNTGFGSAMTKLSVNVNKIATLRNARGGNIPNVLKVTLDCESFGAEGITVHPRPDERHIRYADVYELRPAVSTEFNIEGYPSEKFLDMVLKVKPTQVTLVPDAHDVITSNAGWDTKNNFDFLSKVVDLCKSANIRTSIFVEPDLEIVEYAAKTGADRIELYTEPYAVRYPQDKEDAIKPFVEAAEHARGLGLGVNAGHDLSLENLRFLHERIPFLSEVSIGHCLICDALYLGLRETIKQYKECLKMNLLTLLLQTTDTLVTPPVLTPTVETAGDLNLWELACKGGIIMIPLLLLSLLSIYIFFERLQVIRRAAREDNTFMERIKDYIHEGDIDSALKLCKKTNTPYSRLIAKGISRLGRPMNDVLVAIENVGNIEIAKLEKGFPWLATTAAGAPMLGFLGTVTGMVRAFYNMASAGNNADISTLSGGIYEALVTTVAGLIVGIIALFAYNYLVSRVDGVMNQLEAKTMEFMDLLNEPAEMALKRRHKIDATFSMASMTDVIFLLLIFFMITSTIVFPNSIKVNLPQSNQQAAAKPLTRVTIDENLNYYIAFGNEAAQPVTYDQLVQKLAETPQHDTERFVALYADETVPYREIVKILNIANDNRLKMVLAAKPVHNPMEQQKKDKILALVTTIVLHIVVLFVLWLTFLGKEPIGTGSGVLVQVGFVDESAGMFESNADRPEQTEAERPRENEDELLTQTDEESIHIEKKEDKKDKTIQENKKDERIANQVKNAFGKGVSNDGSRGDSDEGSGTQGNPFGNSSTGEITGVGGYGGYNLGGRGLVGSLPYPEYDNSNDAGIIAISITVDPQGKVISAIATVNGSKGTAFSNPKLRASAEAAARKSRFERSTGSSNQTGVIIYIFKQNMKKMRKLSLFIILLGLLEPVSLRAQHVEPIAFGDFEHWVTREIKESALLGGKTKTVYAIAPTQYIKGNKAYRNMGGSPWASSNVMANVMGIVKTSNTVRPEKRQDGGTCACMETVIEDCRVLGMMNLHVLVSGSIFLGEVNEPIRSTSNPYGKMEMGIPFTKRPVRLIFDYKYKASPDDFRTESTGFSSRKQLAGRDSAEVYILLQHRWEDEDGNVYARRVGTGRERYIKSTPDWVNGHSVPIHYGDITDKPFYKSYMGLIPEDKSYYCRNSKGDMVPVVEVGWGEADEPVTHMLVMASATCGTAYIGGLGNTFWIDNIALGYMFETKNVSLCKNTEGFRKVFKSETISLIFIIFAICMKIEAVMDTATFNTFLVVMAVTALIVFIALHFINAGYGMLFDKKWGASLSNRIGWIVMEAPVFIAMIFLWIFATDEYRFDPIRITFLVLFQIHYFQRSFIFPFLIKGNSRMPLSIVSMGIIFNLLNALMQGGWIFYISPLDYYTAEWFYSPQFIIGVIIFFAGMFINIQSDSIIRHLRKPGDRRHYIPQGGMFRWVSSANYFGEWLEWVGFAILTWSWAGVVFAWWTFANLAPRSAALYKRYSEEFGEEFTKEKRKKIIPFIYMDNEYSQKQAILFTPASIGPITLRNRTIRSAAFEGMCDHNAPTEMLYDYHRSVAAGGIGMTTLAYASVTRNGLSFKHQLWMRPEIVKPLRRITDAIHDEGAKASIQLGHCGNMSHRSTAGQIPISASTGFNLYSPTFVRGMRKDEIEEVAKAFGTAVNTARDAGFDAVEIHAGHGYLISQFLSPYTNRRRDEYGGSLDNRMRFMRMCMENVMKAAGNDMAVIVKTNMRDGFKGGIEIDEGILIAQELERLGAHALVLSGGFVSKAPMYVMRGEMPITSMTYYMKTWWLKYGVKLAGRFMIPKSPFREAYFLDDALEFRKALKLPLIYVGGLVARPTIEKVLDHGFEFVQMGRALINEPDFVNRMKNEGEERCGCDHTNYCIARMYSIEMACHKHLEGQLPPCIAREIEKMHHATKMPRNKDLSAYTALVTGASSGIGLEYARQLAARGANLVMVSIDREDLDREAKKIVDTSGVSVETICMDLAQPDAANKLYDHCRQKGIQIEILINNAGIFSFQEITRTDPKKIETMLQLHIGTITRLSRLFAADMCNRKHGYILNMSSLSCWTPYPGIALYTATKAYIRVFTRALGYELRDYGVVATVVCPGGVATGLYGLKPGLLKLGVRLGVLMTTERLVRKALKALFRGKKQLIPGVFNRLLIPLASVMPTSIRLFVKHRLLDEMNKDYYIVTGANGSIGQAITEALAAQNLPVVMGCRNIAKSQPIRQRIMEKTGNSDILLLPLDLASFQSISHFCKQLVETGISIKALVNNAGVMCKDFGKTVDGFETSIGVNYIGTVFLTESLIPLMHPGSRIVMTTSLTRYIGKIDSSFFSDSPRTYKRFKAYGKSKLALTIYTAHLSMKIRDKGISVNAADPGIVDSDMITMHSWVDPLANLFFRPFISSPRKGAIGAIYAASAPDTDNITGEIFTKHRHTPIPAKWRKSRQALWLQNETEKIIAGIRSMTIIQIRKVPSIDIPLFNHIFINEPPFFSTQNKNYNFVFNSENTTFAKYSDLHFLLFQGKKKQEISLILRTSSAGKNNDVNRYTISPLFLMVSYKELGLVNTKEMFAKAIKGGYAIPAFNFNNMEQLQAIIKASVETKSPVILQVSKGARNYANQTLLRYMAQGAVEYAKELGCEHPQIVLHLDHGDSFELCKSCIDMGFSSVMIDGSHLPYEENVALTKKVVDYAHQFDVTVEGELGVLAGVEDEVSAEHHTYTDPEEVIDFATRTGCDSLAISIGTSHGAYKFKPEQCHVDPKTGRLVPPPLAFDVLDAVMEKLPGFPIVLHGSSSVPQEEVDTINKYGGKLDAAIGIPEEELRKAAKSAVCKINIDSDSRLAMTAAIREVFATKPAEFDPRKYLGPARDNMEKLYKHKIENVLGSAGKLMRYACFLYLLIKGVGKNVYLCNDCRKQAGLADKKSPIDFVRNLFTMFNKYTQKKVKSLYNRTLLHFETVSAFSIQLLSVLLPSVYFLMRKWRIEDSAELYNINGWGLKYFSINDKGHVAVTPREGSASVDLKELMDELQVRDVTSPVLLRFPDILDNRIEKISKCFQQAADEYGYTAKNFIIYPIKVNQMRQVVEEIVSHGKKFNIGLEAGSKPELHAVLAINTDENSLIICNGYKDENYVELALLAQKMGRRIFLVVEKLNELRLIADISKRLKIRPNIGIRIKLASSGSGKWEESGGDGSKFGLNSSELLEALDFLEKAKMTDCLKLIHFHIGSQITKIRRIKNALKEASQFYVQLQNMGFHVEFVDIGGGLGVDYDGTRSSSSESSMNYSIQEYVNDSVSALVDACAKNNLPQPNIITESGRSLTAHHSVLVFEVLETTSLPIWDEKEELGENPHELVDELYKIWDNMNQPRLLESWHDALQIREEALDLFGLGLLDLRTRAQIEQLFWSVAREVNEIASDMKHAPEELRKISKLLPDKYFCNFSLFQSLPDSWSIDQLFPIMPISRLDERPDRTATIQDITCDSDGKINNFISSHGANSHLAVHALNNKEPYYIGVFLVGAYQEILGDMHNLFGDTNAVHVSVYKDRYEIDQVIDGETVAEVLDYVQFSPKKLVRSVETWVTSSMKAGIITPEEGREFLSNYRSGLYGYTYLENDMDYRDTSFPVIHSYLKMQRYFIYLSFNGAQYHGWQIQPNGITVQEVLEKALATLLRRETPVTGAGRTDAGVNARLMVAHFDAPIPLDNPTETADKLNRILPPDIAVYEIRPVIAEAHSRFDALSRTYKYYIIDHKSPFIESFACRYRGDLDFDKMNTAAEQLYRYTDFTSFSKLHTDVKTNNCRVTFARWEPEGERHVFTITADRFLRNMVRAIVGTLLDVGQGKLSVEDFGHIIEQKNRCAAGTSVPGKALFLHDIVYPDHLFLPRMKIKHITQNKADFLDLLLLADESETMIARYLDRGEMFALYDDDLKSICIVTQEGKNLHEIKNLATYPPFQRQGYARRLIEYIENRYNAPGTILQVGTGDSPLTIPFYEHCGFRYSHRIPRFFTDNYPHPIFEGGKQLVDMIYLKKELMELLYIHWNPDPILFSIAGIAIRWYSIFWFIAILAGSQVVYKLYQSKGLPVDTFQNLFLYSFLGIFIGARLGHCLFYEPDYYLSHPLEIVLPVHFYPDGDWKFTGYAGLASHGGTLGLIIALAIFCRKTKIHYLDILDMMGIAAPLAAGFIRLANLMNSEIIGLPADVPWAFVFEREDMLPRHPAQLYEAIAYFLFFLIMVGVARYKKDNYGRGFYFGLCITLIFLFRFFIEFLKERQVDFENVLPIDMGQILSIPFVLLGLYFVITKRKKAVRMPVTIPTHKATQQSDCGILLKTISPGSFQEPVQYAHRDDYYIFGIVENGHCCISIDFKNYTVSDHEILCVQPGQVHRVVDTGNAQATILFIDSVFIDAPDKQILSEYALSVAPFRINDLQFNELEQIFSIISRNINIPESSRTKRIVQDLSRAATGIIIDNIQNIICRQLKSRRQIEITLALKKLLSEDSHINRRPSYYAQLLHISPVYLNEVVKNITGTTASKYIQDEIILRAKRMLIYTTLSIKEIAFNLGFDDHTYFTRLFTQTAGLSPTTYRKKYLEMNKRRLIYLTDAILIPLFVLSLYSGIQLHIAGHGTEHDIWHNWAVFHTIDSLLFTTFGIIHIKSHWFWYKGLKNKKRERKTRRKQKIVLLLTFIFIWVIITGIWLLCFVEGANSPFGKLHYKAGLLMGILGLLHIVKRLRLLKNGLCLNTSHPTSTPPISPKMWLSLAFLSAFLLGCYEVCKKKSLDNNAVIPVLFLNTCFCSLLFLPCIVLSYGFPEFMRNSLFYVPPSTGHEHIYIIGKAALVLTSWTCAYFATKHLPITIAGPIKASQPILTLVGALLIFGEQLNLYQWIGVILAIVSFIMLSFSGRKEGINFKHNIWILFIVLATITGAASGLYDKYLMSHGFDRMTVQVWYSYYQMAMMTVILFVLWYPKRKHTTPFVWKPSIFFISLFLVCADFVYFYALSYPDSMISIVSMVRRSSVVVSFIAGAFLFREKNIRSKSFDLILVLLGMFFLYLGTKMKLKNLLFCLCSIVTLTSSAIEPVAQLFIAMPDSLVPSIEVNRRKDLIDLMHAGQKAEIVTKLGSKAEMTLLQDSLLSIDLSKRSKMEIRWYDTTGNDTIIALVNTVYAPAGDSRIRFFDTAWKELPASERIRQIRREEFFQFPDSLTKAKKEDLLRPVDIFLVEYNFATDGSLCARQSWANYLDKESFDRIEPYLQDSIVLHWNGKRFKMFGDIYSIGLRETVREEFPLCRIILENEMEIVFTLLPCVALAVMKRTKVVDAFDASLYGTKVNVKGWVRTRRGNKNVNFIAVNDGSTIKNIQVVVDLSKFSEAEMKPITTGACISVIGTLVESQGKGQQAEIQADSIELYGGADPDVYPLQKKGHTLEFLREIAHLRPRTNTFGAVLRIRHNMAYAIHKYFNDRGFFYLNTPLITGSDCEGAGAMFQVTTLDLNQVPKTEDGAVDYSEDFFGKPTSLTVSGQLEGELGAMSLGAIYTFGPTFRAENSNTPRHLAEFWMVEPEVAFNEIGENMDLAEDFLKYLIRYALDHCQDDLEFLCQMYDKELIDRLKFVVDNDFVRLPYTEGVKILEESGHKFEYPVYWGADLQSEHERFLVEEHFKKPVILTDYPKEIKAFYMKMNDDGKTVRAMDVLFPRIGEIIGGSQREENYDKLLARIEELHIPMKDMWWYLDTRRFGTAPHSGFGLGFERLLLFVTGMTNIRDVIPFPRTPKNAEFMESEKRAKRPRIGMSNREGATERYEKVEYRRNGGEEGHSSYSANAERPYYPRNNYGDGGNRSYGNERPNNYGNRQGGYSNNRQGNYGNNRRNNNYNNTPRYNQDYNRNNEVGEGFQQPYGESERPRYPKQNNRPGGYNNRGYNNRGGYNQNRQQPRRNNKVFSRPQRIEYELPEVDPNEPIRLNKFMANAGICSRREADEFIQAGEVLVNGVAVTELGTKITRNDTVTFRGKVVTLERKIYVLLNKPKDCVTTSDDPQGRLTVMDIVRNACTERIYPVGRLDRNTTGVLLLTNDGDLASKLTHPKFIKKKIYHVWLDRDVSEEDMQRIADGIELEDGPIQPDAVSYANETDMNQVGIEIHSGRNRIVRRIFEALGYRVVKLDRVYFAGLTKKNLQRGRWRYLTQQEVNMLQMGSFEMIVIFSHKQKLVQTESKNKFTIEPQPMFVNTLQRYEGFFILLLLQSNKLLFSAMHIYPPSSETTVSSASPLSLYDTEEKGKIYPCAEMRITILIFSSYCIYVALPDISALFFRTVRDWSEIIKTSSLPCPVVLWGVLRQQNIEAVSEGQRGMKNRNETCNRRRIREPLILLRRLSHAGSVLGSVENQKEMELSSLTAISPVDGRYRNKVKNLSLYFSEWALIRYRVRVEIEYFIALCELPLPQLSGVNPDLFPALRKIYTDFTEADAEKVKSIESVTNHDVKAVEYFIKEKFDELHLEAYKEFIHFGLTSQDINNTSVPLLLKEALHDCYFPVLKDMLAIINRYAEEWKDIPMLAKTHGQPASPTRLGKEIRVFGYRLERQMALLESVPVSGKFGGATGNFNAHRFAYPDIDWPAFGNRFLKERLGIDREEWTTQISNYDNLAALFDALRRINTIVIDLDRDFWQYISMEYFKQKIKAGEVGSSAMPHKVNPIDYENSEGNLGIANAILDHLSSKLPVSRLQRDLTDSTVLRNVGVPLAHTLIAFHSTIKGLNKLLLNEPAIYRDLDQMWNVVAEGIQTILRREGYPHPYETLKALTRTNTVINADSIREFIDTLDVSESVKEELRKITPHSYTGFMIGMLSACTLLLQAQSIDEETARAEACRFFNERITKIPSKRDISRQSPRLKLAEKRMLSNNETAYYIFNRGETDGFVVVGAQNEPIVLGYADEGSFDPHNIPDGLRELLNSYADELEWAANQTQSISASPKGSTPDKPAIAPLCEAMWNQDDPYNRLTPIINGKHAPTGCVATAMSILMYHHRWPEQGSGSYGDVDFSKARYNWEQMTPTYGTGSEETACTEVAELMYHCGVAVKMKYGATESAAFSTNIAPALNDYFGYNGVLYAEKDQYGIKTWEDLIYNELSENRPLYYAGGVHAFVCDGYDGNGYFHFNFGWGGHANGYFRLYAIRLSDVGIGGGAGDYSSGQCIVYGIERPDANRHVPLSIIGYGSLFLTDSQNGSFGYNADVINAGEETISIETGIEIKPSNGGDSQFHFITTESFPAQYNERYFFDIPLDNLPELPIGEYNLYPIYRITGKNQTKVVPFPSNKIQYLSLTVSNEGKNFSLPAIEPIFTSQITPKHELYSGKRADFDIKLSVTGYEYSGDIQLLLTRTDNSYSWSKQRPVDLTPGDTIDFSWSEILIGAMDRPVPAGEYKLQLRVKYQPICEQDITVLPAPETSVLELVSPIAVKNQGCVSPDKFEASFTVRCTSGCFIGCINAFCYDKASGNGIAQPFESDFLVLKEGEEQTYVYNSLLTAEQGTIATVDIFTDLDNDGIGEIIGPTEYNSVPFMIAPEHYLAIDDVTVFPDTAFQKYLHTIDWLNDGYMSDYEFNETTYINVNERNITTLKGLEFFKNLTRLDCLNNKLQAVDLSGNTHLSEVNCQHNNIDTLIFENHPDLAWLACGDNRIEELRISNSPKLTYLSCEDNRLRNFSFGILPALQDLMADNNPLDDIDQFDFTRLPSLKMFRLSGSNATTFRPTNDSIRTLVIGGNTMLEELNVSGCTELSTFHLQNCPRLANLSLTNEKLTSVSLYENSGLSYLDVSSCTSLSDFECSGSPLFMLDLSSNTALSSATFRNGRDCTVTVNDKNCFDLTDWIGQGFRIDRMSNLQNASVKDNSLHFGASYVQYDYLTGNDILPSIPVTLQSEGWASGISMPKQGNKVYAIGREIIIEGYQNESISVYTMTGKHLFDKQAQSFTVPTAGIYIVKVNDRATLVSVPMLSFNFFSQKLLFLRYLPYMVNVTPRNATGHGRGEGEMQIPLIHMLFSTLPSLRTPPYVLQDKTPRNATGHGRREGKIPTKHRSEMSLQFLSLASGSSGNCYYLGNEEYGILIDAGKGVRTIKKVLKEYGIPFEKIVALCITHDHADHIKAAGTLGEKYGIPIYTTEAIKNGMNRNYCMVDKIYSAHRPIVKEIPFKIKDFTITAFEVPHDGSDNVGFFISYGNLYFAFATDLGHITPTADKYLRQANYLVIESNYDEAMLRNGSYPLHLQRRILADSGHMDNARTAEYLARIYTPALRNIFLCHLSGDNNHPELAYKTVENRLYEEGIRVGKDVELVALTRNHPSELYTFEESERMDWNSAVSGEDDCLGMLKTALYLIPVPLGDTPVEQVLPSYNREVIAGIRHFIVENVRSARRFLKKSNPDICIDDLTFYELNRHTEATEVSGFLEPLRRGYATGVISEAGCPAVADPGADVVAIAQREHLPVVPLVGPSSILMSLMASGFNGQSFAFQGYLPIEAGERIKRIKQLEQRVYAEGQTQIFIETPYRNHKMIEDLVRSCRPHTRLCVAAGISCPDESIRTLSLGEWAKTKYDYQKTPAIFLLYKMTDLPAPFIERTRRLLGDDYPRFAEALESESPTSIRLNPSKSTPTGTIGDPVLWARHGFYLSSRPTFTFDPRLHAGAYYVQEAASMFLNRVIRQYVHEPVRYLDLCAAPGGKSTDAVASLPVGSLIVSNEVIPNRAHILAENIVKWGSPYCIVTRNEASAFGALEEYFDIIAADVPCSGEGMFRKDPAAITEWSAANVAHCAERQRAILTDVWNALRPGGLFIYSTCTYNTEENEEMIGFLRKKFGAIPLTVDIDPAWNITPALVGDLPAYRFMPHRTRGEGLFMAILRKPGEPGETRREALLSTAEKTEKRNKKNKTPRIAIPDEWRLLVANPDRYTFISDEEKIIAIPAEYTTDYKLLDRNLDLLHAGITVATLKGKDYVPHISLALSTAFDMNKVVRYEASLDTALAYLRRESLFLPTDLPRGYILVTYEGFPLGWAKHLGNRTNNLYPQEWRIRSGYTPDTPFELNIAPKMSFFNTISKNDVVFLTPLIVATAPLSLPYIANATPRNTTGHGRGEVLILLITGTERYVFSSSSLWRQQMPRPYICLKKSMETQEQKFTRELANSRMQIELLRNQVLLRYYAQLLELDIMQHPKEVKTLMSSINTLERYARKYTPKDSAEVTPVSNETQPMTNGKETATNTVPHEGEKTETIEPKKIQNTAVAKPTPHTPVEPPHLSSVTNFPEGIKIKKVVHRSKTHRKMFVLRSTFIIFARDAKEIEPGRAKNFHIGSFVFSLYRNNGQKQMKTLKLIKNDPWLAPYKQAIEGRHNRAVEKISELTGGTGNLSDFADGYLYFGLHKENGHWVFREWAPNANAIYLIGNFSNWKERPEYRLLAIGRGVWEIKLPLDTLHHLDFYKLSVHWPGGQGERIPAWATRVVQDPETYIFSAQIWDPEKPFVFSKKPFRPQTSPLLIYECHIGMAQQEEKVGSYTEFKEKILPRIVADGYNAIQIMAIQEHPYYGSFGYHVSSFFAPSSRFGTPDELKSLIDEAHKMGIAVIMDIVHSHAVKNEVEGLGRFDGSYNQYFYGDHRREHPAWDSLCFDYGKNDVIHFLLSNCKYWLDEFRFDGFRFDGVTSMLYYNHGLGQAFGSYDDYYNGGQDDNAIVYLTLANELIHQVNPRAITIAEEMSGMPGLAAKFNDGGIGFDYRMAMGIPDFWIKTIKEKKDEDWKPTAIFWELTNRRSDEKTINYAESHDQALVGDKTIIFRLIDDVMYWHMSKGDTNLIVDRGMALHKMIRLVTLSTINGGYLNFMGNEFGHPEWIDFPRQGNGWSYKYARRQWDLVDRNDLKYQYLGAFDEAMIHIISQKKKFERTPIVKLCENDGDQVLAFLRDDLLFVFNFHPFKSFNGYGILAPTGEYEHILSSDDPAFGGYGLIDMKVKHLTRHDPLFEKDNKEWLMLYLPARTAQILRWKKPEPGETKNASKSKKSAGSIKKENKSKKKMKKILGTLLILTNIVIFSGCTFINEEEKFNPVALKIESTDLAQTTRDEYTIPAGGGQLTVYSAEEKNPFCLVNWFEVNGVECYLNGVENDLYNDRADYSYDWGEIIISSATLPVKNNITIRPNLSGKERKIRIGLNCFKYDYRILDIIQLSNESNPMYLSCFFSSIFVGGVPEIRAGDSVRGKNVLGNCSITFGIMAFSIDYLRRNSILMETFYLIIVIFIFLIAIFDLSVGVSNDAVNFLNSAIGAKAAPFKVIMAVAAIGIFVGASMSNGMMDIARHGIYQPQYFYMNEIMSILLAVMLTDVVLLDIFNTMGLPTSTTVSMIFALLGGTFALAIVKTINSAGALQMGDLINTDKALQVIVAIFVSVAIAFFFGVLVQYIARLIFKFNYQKQLKYFGALFGGFAATSIIYFILIKGLKESTLMTPENRQWIHDNTQILLGCCFLCTTILMQVLMWCRINILKIVVLLGTFALALAFAGNDLVNFIGMPLAGYSTYHDYIANSNGVSPDQYLMTSLLDSASTPSIFLIGSGIIMVVALLTSKKAHNVIKTSLDLSRQEAGEESFGTSPIARKLVRMTTNTSSFIVNNIPPKARTWLNARFDKDEVILEHGAAFDLIRASVNLVLASLLIALGTSLKLPLSTTYVTFMVAMGTSLADKAWGRDSAVYRITGVISVIGGWFLTAGAAFLICFTVTMIVYFGGSIAIILLGALAAYMLIHSQISYNKKLKQEKNSSLAQQMVANKDKQEALVLLRKFSREEFAKVLEWSADLYHRVTTGFLNESYRTLRKAMGDIETERRYFKQVKRLGTIGVSHLNDKVGLEKGLYYFQGNDFSYDIIHSIKRTCEPCLEHTDNNFNPLEQSQKDSFGEIAQSIVSFLEESRQSIEKDAFGDLAALYNQGNILINQLGVLKREEIRHMREQVSYIKVGIVYLTVIQESQNVVAYTINLLKMNQKFQEGNMTPWKIRKNYVFIHLTPLLRNYRFFGVSPIANATPRNATEHGKGEGMKKNNTKSKHNDSVENPWGIGLNFSDEFFGNNPISDSSMRLIRFLCCGFMWRNLVNTGIVCLLLGGTVSCGRTDVYNEFNTLPKNGWFKRDVQRFTPEVPDTVNRYDVYLSLRHNGDYTYRNLWLFVSYNDEGGVLKTDTVNCELADEFGRWSGGGWGSYYQQEVLLNDDFRFSGEKEHVFTVQQAMRDDRIRGISDVGIRIVPHEEKMDNTNDNNTINPSEKTQLDPCACRRKGAKLEVYDWLSDIPESHDDTDLVEVRFKNTRKGYYRNTTHIKLAPGDLVAVEASPGHDIGEVTLTGRLVLIQMKKNNVKIDNPELKRVYRKAKPNDLEKFEEAKAKEHDTMIRARKIAEDLHLNMKIGDVEYQGDGNKAIFYYIADERVDFRQLIKVLAEAFRVRIEMKQIGARQEAGRIGGLGPCGRQLCCSGWMTNFVSVATSAARFQDIALNPQKLAGQCAKLKCCLNYEADAYVEAQKRLPSREIPLETKINTYYHFKTDIFKREMTYSTDKSIAANLVTISADRVFEVIALNKKGIKPDTLESEAGARAPERRDFEDVVGQDSLTRFDKAKKNKKRNNNGGNNNRRQQSGERNNRSNNNNRNQNKASRDGNKKGGNDNGNHTAAARNGSENISSKPAASDKKEMNYILLIFSVIGGLVIGGLVVFLVNRYLLATRSKTILEEAEKEAEVIKKNKLLEVKEKFIHMKAEMEKQANARNAKIQSAEAKLKQREMQLSQQQQDLQKKKSETDAIRANLDTQLEMVEKKKQELEKLHKSEVERLEHLSGISAEEAKERLVESLKEEAKTQAASYINDIMDDAKMTANKEAKRIVIQSIQRVATETAIENSVTVFHIESDEIKGRIIGREGRNIRALEAATGVEIIVDDTPEAIVLSAFDPVRREIARLALHQLVTDGRIHPARIEEVVAKVRKQIEEEIIETGKRTAIDLGVHGLHPELIRLVGKMKYRSSYGQNLLQHSRETANLCAVMASELGLNPKKARRAGLLHDIGKVPDEEPELPHALLGMKLAEKYKEKPDICNAIGAHHDETEMTSLLAPIVQVCDAISGARPGARREIVEAYIKRLNDLEQLALSYPGVLKTYAIQAGRELRVIVGADKIGDAETENLSTEIAKRIQDEMTYPGQVKITVIRETRAVSFAKMNDDKLKITLRIADLKTPLALRVDYGADEKYWRDAADLFNKRWAFYKDKYKDGLMDSESMMAMVAVEMARLYCEMVQDRKTLLADLRKLEAEAAKILDGHTGEMAGSSKDIIDSLIAKFHAMSDLCKAFENENGILKEQLMHQKQEMQALQSKYEELEKRYGNLKLSKTVAGQDGSSTEETKVRFARLVREIDKCISLLNEMWIEWLNNIKTGAISFWESIDVSKVVDLFVYDGQNPLMFNTGLFLFLFVGFIWIYRLLARRDTLRIYFVILFSLYFYYKSSGLCFLLLLFVALSDYSLGRLLGWVSWKWMRRFFVLMSMAVNLGMLCYFKYTNLLLGTIADFTREPFEPLDIVLPIGISFFTFRSLSYIIDVYRRQMSPVTNLRDYVFYLSFFPPLAAGPVVRAKDFVPQIHRPLEITPMLLGEGLFLVMCGLIKKVVISDYISVNFVDRIFDNPMLYTGFENLMGVYGYTLQIYCDFSGYSDMAIGIALLMGYRFKINFDSPYKSGSITEFWRRWHISLSSWLRDYLYISLGGNRRGKVRTYFNLFITMVLGGLWHGASWLFVIWGAWHGVLLIVHKVYRRIFPVAKDDRPGIIRHFFHVLLTFHVVAAGWIFFRSPSLDVAGQILTQIFTNFRPEAIPSFVSGYAVIFVALVVGYLLHFAPHRWSQWLQRELSWSPLVVKAAILALVLFFVLQVRSSELVPFIYSQFMKFRLSVIGFFFVVAVLAVQLCAQLTGDTVTVPSFLKKEKNVIEFNDADWSALFDGMVRLQNDTDTVPRVVAMVHIGDSHVQAGFLTEAVRLPLQRRFGDAGRGLVVPLKLAKTNEPRDYSVVADGSWNFSRCVGRKYSNYTPGVGGIAIVPRNGRIDLTVSTLSKTDDCAGFKKVRLFHAPVDSFPGVISEPFLVEGETRLPFLTHFSWEESVCSVHLTGEAVSKETPLAIYGASLETGESGILYHTIGNNGAFYSSYAAIPGFSEQVAALSPSLIVLSLGTNESFSTSLTRDELYKQIDTVVSSLRKDCPQAQILLTTPAECARRRVRRVNKKRRVYYTPNARVKLVRETIRSYAVEHRLACWDWYEIAGGEGSSSQWRKAGFMAYDRTHCTETGYRVQGEMLYRALMKAYQEYVDRVAQMVALLVLSLVFLFLLTQLPVLEWGGFATKPVDLFSDIRVDEQDLDLPGDAEWQEEGMEWLNEGVDSLSSVEKDEPQDRQVVPDTIRVQETADTLLVTNISSDTAEVGNLPRRDGDVVLFEDFSPGKNGLSHLLSSLKERASLGRPVRLAFLGDSFIEADIFTQDVRSLLQSRYGGSGVGYVSMHSDFPGFRRSVIQSGEGWEVHSVLKPKEVDWKVMTLQQQYFVPLEGATAQYRGTAKIEHADSWALSRFVFIARQDCSVELKIADGEWQVFPVAGSHEIQSLAVEGQTPRFQVRVGNTPGFAAIGVWLDDVQGIAVDNISTRGYSGLSLGALSRERAIQMDSIVPYDAIVLQYGLNVMTPEILHYGSYARKMTEVVRHLRECYPHTDIILMGVGDRSRKANGAFVTMPAVVALSEAQRRAARSAGVVFWDTYEAMGGHNGMLDYVANGQANKDYTHINHKGGKRLATEFVKSLEYEMNREGLMPVFVFRGIIPLLFILHFGYSNETTKIEKGEWRKKNSPYFSTELPPISAFHTKIGKDLYLRTIPSKFHSSHSHFLQFSPSSRFFQETTILFAFFRFFFMLTLALLPPIDDWVYIVVYTIYAITILGTIVIIITENRNPVKSLAWVLVLAFLPIVGLVFYIFFGQNFKAKRMVSRRIKRKLRKRDYHSIVNIDSLPLSEESKQEIRLCHSLCSVPYYSGSHVKIFTSGEDKFKHYLQDLEIAQEYIHIQYYIFEDDKLGNRVKEVLLRCARRGIQIRILYDDVGCWSVKKRFFKEMQDAGIAVRPFLEITFPQLASRINYRNHRKITVIDGKIGYIGGMNIADRYVEGTKWGTWRDTHLRIEGPAVRGLQLLFAVDWSYECKEVLSDSRFFPPVADKGKSGIQIAPGGPIGEWSNIAMLFLKAITNAKKNVYIQTPYFLPTESLVKALQTAALAKVDVRLMIPERSDSTVLRFASFSYITEMLRAGVKVYFYQPGILHSKTIIIDDELCSVGSTNFDFRSFEHNFEANAFIYDREVNSEMKRIFLEDQQQCRRIIQHYWRHRPLYQKGIESIMRLLSPVLMITDLLVQQIESCLPYEPNREQSELLQQLAAFVLDGRDDSLFLLRGYAGTGKTSLVGALVKALTQLQSKVVLLAPTGRAAKVFSRYARHPAYTIHRRIYRQKSYSPDMEGFLIGENLAKHTLFIVDEASMIANSVGEGAVYGSGRLLDDLVEYVYSGEHCRLILLGDTAQLLPVGQERSPALDAAVMGGYGLNVVEYELREVARQAAESGILYNATRLRECMEEMPLPRPCLRVNGFPDVEALSGEYLVERISDSYDRVGLDETIVVTRSNKRANIFNQGIRNQILYREEELTAGDLLLVAKNNYFWGKDYKEVDFIANGDVARVVRVLKRTDMYGFRFADVQLYFPDLEVEMEVKILLDTLTSESPSLTREQQETLFAQVLADYYDVTTKREKMKRLKTDPWFNALQVKYAYGVTCHKAQGGQWKHVYVDMGYIPQGAVSLDFYRWLYTAFTRATEKIWLVNMSEEFREPSLMPLRSPFTIFATNTKANDGYFQPPDPLHYVPPLLYFALQNTGEEAKPGDTLLCLHKDSMEPIEALNRPIKESHKYILAMYADGSYLYILLQHTENRDEIVTERLPLTSEKGVPSIEEAVFSQPILTRPFEKVFFIADSPRFIFIPDEFASTEDNPLYFDFCFPDSEGTLISADLPQTGAKILFDLNTELSSFVKRTLDRPVLLHRLAPACEYFFRKSRLGYTSKMYVHWETDHIDLFCFNQQGFLLSNSFRIRHINDGIYYLLNAWKQLGFHAGEDELSLSGDHENLRQNVIPALRKHLSYITLTKFPSHALTGKENLPLPLRLISVYMRMRNSFLCLFVFAVANMGAQNNMADILASIETNNPELKAGAQIVLSQKAEVSSQNTLEDPNFEFEHLWGADNAKDRKYDISVSQSFDFPSLYVQRNKIGNLKRTLYDGQQAVLRQQILLQAKELCLQVIYLNRCIRLGNERQAAADELVKLYRERLTSGDANILDVNKIEIEQLNITTSNIQRRNELAACLAQLQALNGGEPLNLAESALTEYSDRELPASFDDLKEQALQSDPELQMLRQENQIAGKEISLNRAGWLPKFELGYRHAYELGERFNGLSVGVSIPLFANRKKVKIAKAQAVAGSFTVNNKELQTLAVLQSSYNEAVALKDNRERYELLTRQNNFELLQKALASGKISMVEYLVDATQLYEAFENKLSLEYEYQLRLARMYKFELMLNKIIRYSLNNRLLILVASVLLLFAGLYTSMKMDVDVFPDLNAPTVVVMTEAPGMAPEEVERLVTFPVETALNGATDVRRVRSSSTTGFSVVWVEFDWGTDIYRARQITSEKLAVVGESLPEGVGTPTLGPQSSILGEMMIIGLTSDSTSLRDLRTLADWTIRPRLLSIGGVAQVTVIGGEMKEYQILLDLPRMKQYGVTLDEVLNAAREMNRNANGGILYEYGNEYIVRGAVATTDVDAIAKAVVKRVDGVPVLMGDVAEVKIGDKAPKLGTASVRANPAVLLTVTKQPNTSTLDLTEKLLSSMDELQKNMPADVTVSTDIFRQSHFIESSINNVQKSLYEGAIFVVIVLFFFLMNVRTTLISLVALPLSLLFSILALHFMGLTINTMSLGGMAIAIGSLVDDAIVDVENVYKHLRENRLLPPGQRKPIVEVVFEASREVRMPILNSTLIIIVTFIPLFFLTGMEGRMLVPLGIAFIVALFASTVVALTLTPVLCSYLLGKGKTDKDISREPFVARTLKKYYGQALEWALRHRTGVLGGTIALFVAAMITFFTLGRSFLPPFNEGSFTINVSTLPGISLEESDNIGRRAEELLLEVPEIQTVARKTGRAELDEHALGVNTSEIEAPFVLGDRSHAEVVADVRKKLSVIPGVNIEIGQPISHRIDAMLSGTQARIAIKLFGDDLNRMFMLGNQIKKNISAIDGVVDLNVEQQIERPQLKITPRREMLARYGVSLSEFAEFIDVALAGEVVSQVYEGSRTFDLTVKVKDDERSSAAKIGDLMVDTQDGKVPLSYLAEIKSATGPNTINRENVKRKIVISANVSDRDLRSVVDDIRERIDETVVLPEGYFIEYGGQFESEAAASRTLSFVSLFSLLVVFLLLYNQFRSVSQSAVILLNLPLALIGGVFILRFTTGEISIPAIIGFISLFGIATRNGMLLVSHYNTMLSEGNSLHDTILRGSLDRLNPILMTALTSALALIPLALGGDLPGNEIQSPMAKVILGGLITSTFLNAFVVPVVYWIMNRKKENRMKRNIIFSILFTYIFWGCSGSSSSHGDEHEHQHSDHIEAHDHNHDEHEGHDHEAEEHSDEIILKKAEAEAIGLTTKTIRPEKFHGVISCSGTLLAAQGDEVTVVSPVAGVVSLAGKHITDGSSVAKGSVLLNVSAEKMATGDPAKRAYIDYETARKTYERAQELVKDQIISRQEYEQIYKDYETAKLAYEAIGGGKSGSAVKAPMGGYLKNIMVKDGDFVEMGQPLMTLSQNKRLQLRAEVPQRYYKELPAVVSANFKTPYDDRVYELSRLNGRLLSFGKGTLAGGAYIPVVFELDNKGEIVPGAYIEVFLLTASIDNAIVVPVSALTEEQGLYFVYLRLDEEGYKKQEVTVGNSDGENVRILSGLHEGDQVVTRGVYQVKLAANSGVIPEGHSHNHMWAKKLKILFVCLAGCLAVFSTVIPHHHHENGMICWVIDAAESGDTHSSDVPEKAGDCSGCSWFAYKAPVDTVSLNQYLTLKFAPVKILLGTWAMLSDFVIDSLEVSPCFGIYIERLHTFTFLKTLGLRAPPVAMAKDEVRIDKFMWATRIFKTRTIATEACKKGRVMLDGVAVKPSRMIKVGDVIQVRKPPVTYSFRVLALSENRMGAKLVPGYLENITPPEQYELLEMVRIGGFVNRQKGLGRPTKRDGRQMKQFLESEYADDGFDFDFDFEDDDLDEMKYLIVGLGNIGYEYENTRHNIGFRVLDALAKASNLVFTDGRYGATCELRLKGRVLVLLKPSTYMNLSGNAVRYWLQKENIPVENMLVVVDDLALPFGTLRLKPKGSDAGHNGLKHICEILGTQCYARLRFGIGNDFPRGGQVEFVLGSFPPEEEKQLPEKLERAGEIIKSFCLAGVQQTMNQYNNKMKTFQLNGTARTDLGKKAVKGLRKQGLIPAVLNGGELVELPYQGALKPCEKLVELPGGKKGIIVTDFTVTKDAVRKLVYTPDIFAVELTIDGEKKMAVLKDLQFHPVTDAILHMDFLEVSDKKPVVMEVPVQLEGHSEGVRAGGKLSLSMRKLKVKAIYSNIPERLVINIDNLGLGKTLQVGELHFEGLELMNAKNAVVCAVNLTRAARGAQAAAKMSVKTNGNSISDLAMPSTYLHSDKDSERRAEKKRFPDFLFREEMKGKILVTGGTGYIGSHSTVELQNAGYEVVIIDNLSNSNIEVLDGIERITGKRPTFVQADCTDMEALHQLFKENPGIKGIIHFAASKAVGESVQKPLLYYRNNLMSLVNLLTLMPEYGVEGIVFSSSCTVYGQPDVLPVDESAPIKPALSPYGNTKQICEEIIKDTIHASAPFKSIILRYFNPIGAHPTAEIGELPNGVPQNLIPYLTQTAIGIRKELSVFGDDYHTPDGSCIRDYINVVDLAKAHVTAMNRMLENKSPEAIEIFNLGTGRGVSVLELISAFEKATGVKVPHKIVGRREGDIEQVWANPERANKVLGWTAQESIEDTLASAWKWQLKLRERGIMMEEYKSPVYNVIAVPVEKVVANTYNPNIVAPPEMKLLELSIWEDGYTMPCVCYYIPEKDQYELVDGFHRYKVMKTSKRIYDREKGLLPVVVIDKDLSNRMASTIRHNRARGTHCIELMCEIVSELTKAGMSDSWIMRNIGMDKDELLRFKQISGLAELFADKEFSLTKEIMRQMENLRSSVYEVVLERLNRIFSDFDNVYVSFSGGKDSGVLLNLCIDYIRQNKLNRRLGVFHIDYEVQYEETTRYVDRVLASNSDILDVYRICVPFKVTTCASMYQNYWRPWEDSMRPLWVREKPENCYTKEDFDFYTDDLWDYEFQIKFAEWLHKRNAARRTCCLIGIRTQESFNRWRTIHSDKNYRKYKGLKWIREMKYGICNAYPIHDWLTTDVWVANGRYHWDYNKLYDLYYRAGVPLDKQRVASPFISQAISSLRLYRAIDPDMWGKMVSRVNGVNFAGLYGNTSMMGWHSIKLPPNMTWEGYLDFLLKTLPENTRKNYQRKLSVSMNFWRDKGGCLADETIRKLEKMGIPITVGDHSNYRTEKKPVRMEYLDDIDIPEFKELPTFKRMCICILKNDHTCKYMGFSLNKAEKEQKERVMEKYKALIMSSIKGTKTEQNLLKAFAGESQARTRYTFFASVAKKEGYEQISAIFMETAEQEKEHAKKFFKFLEGGMVEITASYPAGVIGTTAENLKAAAEGENEEWVDLYPEFAKIADEEGFPAIAHTFRNVSKVEEEHEKRYRKLLSNIENGTVFSDSEEIEWQCRNCGYVFRGKKAPEVCPACAHPQAFFERKKNNYMDITALRNLTYGLYVVGTNDNGRPTGCIINTCFQVTSENPIVAISMNKNNYTHDIIVRHGKFSLAILAEESDTSLITTFGFQCGRDRNKYTNYDYEWQNDVPILSGKFSGHIICEVLHIADNETHDVIFARVLNTIPDNGTPMTYAYYHHVIKGKAPKNAPTYIKEENVSPEDPKPNSGKKYICEVCGYIHEGELPDDFKCPVCQAPRSCFKEIMDFIIDNHLQGLVIGICTFLIIGMFHPIVVKAEYYWSTRCWWLFLFLGIAGVISSLCIENVVISSLLGVFAFSSFWSIKEIFEQEKRVQKGWFPKNPKRTYKFMPYWHNRVKHIDLQDILFLDSVVMKYLYAVFFALVFSGFVLPTAVAQTTMEKEIWKIDDNRQNEPVQEAPIEVSSKDGSIYIRTPRKVQVIVYTILGQIVTDRTINPGLSELKIGVRGIYLVKIEGQTQKIALMESIDWSNLSFGYMPTDYNVRCIYKDGKWGDITVTSSQTFEIHMAATCLHYGQEAFEGMKAFRGKDGKIRIFRMDENAARLQSSCRGIMMPELPTEKFNEAILTVVKKNERFVPPYESGASLYIRPLLIGTSAQVGVKPAKEYLFIVFVSPVGPYFKEGFKPTPMAILRQYDRAAPLGTGRYKVGGNYAASLVAGEKAHELGYSAVLYLDAKEKKYIDECGPANFFGIRGNSYITPKSTSILPSITNKSLMQLAEDMGMTVEVRQIPEDEIGTFDEAGACGTAAVISPIARIDDLDENKSYIFSKDGKPGPICEKLYNKLRAIQYGDEPDTHKWITIVEMTTMNIQQIFEKYYQPGTPLYNSVWSHSKLVAEKALKLAQAHPELNIDSDFVYEAAMLHDIGVYLTHAPSIYCTGEEPYIRHGIIGAELLRNEGYPKHALVCERHTGTGLTVDDIVSQNLPLPHRDMCPISLEEKLVCFADKFYSKSTPDQEKPFDKVRKSVAKYGDASLHRFDEMATLFLMPKDSKKYAILLSLLCSSLFVSLIAQDRHPSYSEVTSLDSTTSKDSATLLSNKPITLLDSISKDSLQSDSLGVDSLANDSVSPKKKKAGLTSVVDYKANDSIVFTHGNEVYMYGKGVVQFDGMELNADQIEMNMDSSLVYAVGRPDSVGDIVGRPVFKDKSGEYESETMNYNFKTKKGYITNIVTQQGEGYLTGGQTKKMENDEFYMKSGRYTTCDNHDHPHFYLQLTQAKVRPKKNIVTGPAYMVLADVPLPLAIPFGFFPFTEKYSSGIIVPTFGDELARGFYLRDGGYYFAINDYIDLALTGEIYTKGSWGINARSAYIKRYKYSGNFDLSFITTITGDKGLPDYSKMKNFKIAWTHTQDTKNNPNMSLSASVNFTTSGYTRNDLNSYYNSNSFTENTKSSTVNMTYRIPNSSWSFSATANITQRTQDSTLNVSFPNLTVSMGQIYPFKRKSVVGNERWYEKIQMSYSGRFQNSILTKQDQILKSNLIKDWRNGMYHNIPISATFNVFKYLNLTASFNFTDRMYTNKVMREWDTQQSKIVQDTTYGFYNVFNYYGSLSADTKLYGFYKPWKIFGDKVQAIRHIFTPSISFSAAPDFSSPRYGFWKTLSYVNERGETVTEKYSPFSNGIFGTVSQGKQGTVSFSVSNNLEMKVKSDRDSTGVRKISLIENLSANMSYNMAADSMKWSNLNTSILIKLTKGFNLQMSATWDTYTYQLDSYGNPVRVNKPRWTVGKGLGRLSSTGTSFSYTFNNDTFKKKDKKKNDNKQPQPQPNTLPPDPNEEPEDDTASEESDTQFGADGYAIWEVPWSLSINYSVNYGYGSFNKKKMEYNGRFTQNLSFSGNINFTKNWSFNFSASYDFDAKKIAYMNCNITRDLHCWSMSASFVPVGPYKSYNFHISVKSSLLQDLKYDKRGNSYSRLDWYMQTDNDLILDHLNDPIFHLIGEVADEMNRPCFVIGGYVRDIFLDRPSKDIDIVTLGSGIELAEAVTTKLGKRAHLSTFRNFGTAQVKYSDQKENIEIEFVGARKESYSHDSRKPIVEDGNLQDDQNRRDFTINALALCLNKEHWGMLVDPFDGMNDLKKGIIRTPLDPDITFSDDPLRMMRAIRFATQLNFHIEKETFAAIERNRKRIEIISKERIIDELGKIIRSDIPSRGFILLDDCKLLPIIFPEVAALKGTETIEGRGHKDNFYHSLAVLDNVALRSRNEWLRWAALLHDIGKPRTKRYDSRLGWTFHNHNFIGEKMIPGIFRKMKLPLNEKMKYVQKLVGLHMRPIVLAEEVVTDSAVRRLLFDAGDDIDDLMLLCESDITSKNREKVKRFRDNFELVRTKLREIEEKDSIRNMKLPIRGEEIMETFGLPPSRPVGEILSAIKEAILDGKIPNEYEPARLFMLETAATMNLFPTKKMKTTEVLSELKRRFPNEPEYHQAVEEVLSTIEDVYNEHPEFDRYNLIERLCIPDRMFSFRVTWVDDKGQVHTNMGYRIQHNNAIGPYKGGIRFHSSVNPSILKFLAFEQTFKNALTTLPMGGGKGGSDFNPKGKSDMEIMRFCQAFVTELWRHIGPDTDVPAGDIGVGGREVSYMYGMYKKLARENTGTFTGKGLEFGGSLIRPEATGYGNVYFLLEMLKTRGIDIKGKVVTVSGSGNVAQYTVQKLISLGAKVVTMSDSDGYIYDPDGIDEKKLAYIFELKNLYRGRIREYAEEYGCKYVEGGRPWGEKCDIAMPSATQNELDGDDARTLLANGCFAVSEGANMPSTPEAIEQFLADKILYAPGKAANAGGVSVSGLEMTQNSMKISWTAEEVDQKLKQIMHDIHEQCTRYGKESDSYTNYVKGANIAGFMKVAKAMMAQGILMKKVFRNVFTAAFLLLILIGCSTTKRIADDEVLYTGVKKMEIIPDSGVKIADAAASDVRSTLSVAPNNPLFSPYIRTPFPIGLWVWNYMEPKREKGVKHWIYEKLAKEPVLVSTVQPELRMRVVKDILGNNGYFGAKADYELIYNKRNPKKARIKYRIEVPEAYTLDTIELPAPTTPVTRFIDSINSSSILQKGDRYCLDSLSFERNRITTALRNNGYFYFRPEYIEYLADTTLSPGKVALRMTLKKGIPAQALKPYYVGDVTVRLNRATGDGTPDTIRYPRMTVAYYKPIRLKKWVLPKNITFKPGEIYSIATQNETQSNLGRLGIFRTVAVEVTPLDSLIRKDSLDVMIQATFDVPLEATIEANVSSKSNSYIGPGLIFGINHNNVFGGGEKLSVKLNGSYEWQTGGGSQHGKASLFNSYEVGLNSSLTYPRIVPGFLPQLPRTRKYPAYTRFQLGANLMNRPHYFRMVSFNGSMSYDYRTSLRAGHSVTPFKLVYTKLLNTTESFDKTMEENPAIALSFRDQFIPSSSYTYTYDTSYGREVDNRFIWQFMGMSAGNILSGITSLFGQHGEKHIFGSSFSQFVKGSAEMKYYHRFRAEHWLATRLFIGAEHAYGNSKEVPYSEQFYIGGANSIRAFTIRSLGPGSYIPAKDDVDGYFDQTGTFKLEANIEYRFPIWGDLHGAAFVDAGNIWLLKKDPKRPGGELDRKTFLKDIALGTGIGLRYDIGMLVLRGDLGIGIHAPYDTGKKGYYNMTSFKNSLAFHLAIGYPFMKKALKYIAIVLISLLVLLLTLPLSIYIPAVQRWGKNEISGYVGRSTGMELSIGKLSLKFPFRLQIDDILLLTSSRDTLLQSSSIQVGVAPAALLRGQVQIQKIALNETLFRFSNSDSTLLLSANIKQFSTQKANVNLKDFHISLPSTRLDGGEITLNLSESSPDTVSAESAPLNWSISVGEIGLSNIHYSMQMKPTIENLDASIQKARLLQGEIDLYGQSVRVSEAIIDKGDYRYYPGSGNNEAEPEENDADTIVSPPWTVQIQKLRLHRNHALYALPTRIPQKGLDFGYLSLDNIEIAIDSLYNRGSEICVPIKQLAFTERSGIAVTRTQGTFTMDSTGISLQKFQMNTALSEISAQIKAGNGIFTQNSQTPVEARLQAKLAIGDIIRVLPEYDNYTRGLLLSTGFLSNISVNGKLGDLNLEKADISLPGTFVCQATGNVQNLHEADRINGSLQWELRLKNSPVFANVMPDSLSKKIHIPPTRFTGNARLSPEMIRSKAQIESGDGLITLLARLNTKKEQYDGRILIDRFPLSSFLPHDSLGVLSASTRFSGEKYNPMDSSMYATVDLKIDSVDYSGYRYTGLSIEAKLNRGKMSGGITCTDPNLLIGLSVSGSLSPEEYTADLTGEIHTDLEALKLVTEACSVSTGLSLSGYVSPMSESYRADIRLSDFSALLPTSRLQTNALSISAETDSTHINAAVRSGDMAMNFVSSIGFSSFLEKLNQSLPIIATVQEEKRLDMKALHQVLPPFEFHANAKRNNLIQQYLKGMNMGFSQIDLNIQNDTLLNTTGKIDRFSTGGITIDTLQLSLFERREKEERLYYSLQVGNKPGNLDQLASVILNGFLSGNTTKLFCVQKNRQGQEGFRIGCQADFLDSLIQVSFFPKNPIIGFETWTLNPDNFFAYHYGRHFDANIALTHEDRHFIIKTLHNEQLHDFFHQEALKVDINGMEIAPWLALSPFSPQIDGSISADLLVNFPQSATEVSGSMGISDLYYGKQRVGNFNLNVDYQLDSLGRQEAQADLEIDDKKVLTLNGLLDNQAENPVRLNLSIDEFPLATANPFLPSEMAQLQGYLNGKMGITGSTDTPLLNGYIQMEEAVANSKSMGATLKFPQSQIRVEQNVLQFDNYEITGANKNPLHIDGNIDFKKLDKIVTDLRLYASAFQPVKSARSTKATVYGSVIADMDMAVTGPLDALKIRGNVGLLTGTEVTYVMQDSPFALQQQENNIVTFVSFNDSTEIAEEDTLQKSSVLGMDILVNINIAPTVKMGVNLSVDGKNRIDLQGGGELAYTMNTLGDSRFTGRYNLTGGFVRYNPPIISEKLFKIQDGSYVSWNGDIADPQMSITAVETVRTTISEEEKNTRQVNFDISIIIKNSLENLSVSFDLSAPEDLTLQNQLTSLTAEQRASQAMSLLIYNTYTGPGTSTTKSDLLGNPLNAFLQKELNQWAQDNLKGIDLSFDINSYTDASGVNTRTDYSYRAAKSLFNNRVKVVIGGSLSPDDNADVNFKENFIDDISLEYYLNQRDNMYIKIFRHTGYESILEGEITQTGVGFVVKKRLLNLMELFRPRKSRKGVNLMVMKTSYIFQLLISVCVLLGGISATAQNRSEPYETQAFSDRFRTIQTEVEGRELFPPIIELNTDEHITISFDELAEDVTYLQYSLIHCNADWRPSDLSDLEYLDGFNTNSVEEYEFSTATFAHYVHYRITLPNADVQFKVSGNYVLVVYPENEPENILLQVCFSVYENQVLVAPSVTSRTDIDYNREHQQVEVALNTNNYRVQNPYNELKISILQNSRRDKEVIINRPLRVQGNQIVFGHDRNMIFEAGNEFRRFEMVATRYAGLGVEKIYYFDPYYHVVLATSVPRAQTSYLYDKTQNGRFVIRQSGADDSNTEADYFVVHFTLDSDPIPGGKIYIDGEMTNHRYTPYNEMVYNPASGKYEKTLLLKQGSYNYQYLFLPDGGSTASAGPIEGNYYETVNEYLVKVYHRPQGVRYDKLIGIGMGYSGRMNCKFFTIACALLSMSFCSWANENKTDSVGYQFTVTKELKTNPVKDQSRSGTCWSFSTLSFIEDDLLRQGKPAVDLSEMFIVRNDYIEKAIKYVRMHGDIAFSAGGSAYDVLYIIDKYGIVPEKFTYNGVEYTPQSFAKSLGIKASDYVPLTSFTHHDFYKPFAIEVPDNWLWSEYYNIPLNELMETIDYAIDKGFTVMWASDVSEKGFQYLKGFAVVPVEKKNENLSGTELARWVKLSKSEKEGELYKFEEPEEEQYIDQKLRQEAFDNYETTDDHGMVFVGTAVDQNGTKYYKVKNSWGTEQIYGGFFYASEAFVKYKTMDILVHKDAVPVKILKKLHLKMKRLRLSGLLLLILCLSLLAIPFWNDRIVRRYIDKIWLHRTNSIEKLHEFEQEYKNFECDVLFLTDSATFEIGHDEPSGEPLKPYLDFLGANPDRELWLDLKNLNESNCIQAETTLTGLLAQRDVDKDQLIIESRDWKALHHFTQEGYYTSCYLDIPHIDELSDAERLHRLDSIQQIAHSGAVSALSFPASYYAFLRNLDFSVDLLTWEHRRWAWQLPFFSRSRAILKDGRVKVVLVKEKGHYHKMNINNANECEYLGGGNLRTFTRDKNLDIVKGIGILLIILHNYFHTFPEFPPECEFKYAPENVSRFTEAMLSGNLRIIILSLFSFLGHYGVSIFVFVSGYGLSKRYDHSGESKWYIILRRAIQLWKWLVPMALLLILDRYSGHTHFTYAYLGNNKIWTDMLFMLTFTANGLADRFIIAGPWWYFGMAFQLYVIYALFLRKSSDKVLWGIIAGVWTLLIVLSSLGLDNWVFAFRYNSIGWLPVFCVGILLSRHPVHISWRWISLGVVLFVLSLFNRYLWVISPILALFPVAAVLPLARKEPLQNVLLFMGKLSAALFVTHAFVRQQVLAHDQALPPEISGLLYLVLCIVVAWVYRLCLTYFYKKIHLMERVDVEQRAEKARRFFLEGYNCAQAVVLAYCDLFDISPSLAASISAPLGGGMGRLREVCGAVSGMFMVAGLFYKNDVPSDMTKRKIVYSTVQDLAEKSKALNGSIICRELLGLDHKSDSPTPEARTETYYKRRPCADYVASAARLIGEKLNEVSEEMMNVRIESTWQQRLQSEFDKPYFENLTAFVRHEYATKTVYPPGSQIFAAFDACPFDQVKVVILGQDPYHEPRQAHGLCFSVNDHIPFPPSLQNIFKEIESDLGIPVPRSGNLTRWAQQGVLLLNATLTVEAHRAASHQGRGWETFTDAVIHKLAEEREHLVFILWGSYAQRKGDFIDRSRHLVLQSPHPSPLSAHRGFFGNHHFSQTNQYLEAHGIEPIRWMENKIDWSRTDGLIFDMDGTLWDAVDTYARIWNEVFLRAGKEVHITRESLIGNIGIPIPKILANLFPEIKNEEANRFSKELAKHEPELLSRYGGTPYPGVVSGLEQLSSKYKLFLVSNCDTHTLPIFMSCIGITPFITEAISFGDTHKPKGDNMLLLKEKYHLQHPLYMGDIEADGRETHRAGLPFVYARYGFGHTDDYELAFDSFEDFTNFFLKLKMYSSNFQPESSLRWKRVQSVLQSINADAVLLNTNANLYYSSGRVFNGYTYIPSEGEAIYFVRRPIGLKGENVHYIHKPEQIPALLTEIGLPLPRKLAIEWDASHGDFTRLSAVFPDAEITNGSAVMRKVRSVKTDYELGLLHESAVKHAEVYHRIESVYHNGMTDIELQIEIERLLRLHGNLGLFRINGQSMEIFMGNVICGDNADTPTPYDFAMGGAGLSCSIPVGCNGSLIRPGMAVMIDMCGNFTGYMTDMTRVYSVGELPDLAHRAHQCSIDIHRAVSQMGKPSVKAADLYNLAISIAKEAGLENYFMGHTQKAGFIGHGVGIEVNEAPVLAPRSKDILEGNQVIALEPKFVIPHVGAVGIEDTYTVTPEGMKAITNAPIEIVSLSMQPFIHLHVHSQYSILDGQASIPALVDKAIRDGMKGLALTDHGNMFGIKEFFNLVKKKNGATKDAIKGVQKRIEAIESGAEEVEDKEKELASLQEEKAKLEAKIFKPIFGCEMYVARRRLTDKEATPREIRTTVVNEVEGFSIRRGAVDEGGYHLVVLAKNLKGYHNLVKLVSKGWTDGFYSRPRTDKYELEKYHEGLIVCSACLGGEIPRRILTGDIQGAEEAILWFKNIFGEDYYLELQRHKATVPRANHETYPLQQVVNDRLIEFSRKHGIKLVCTNDVHFVEEENAEAHDRLICLSTGKDLDDPNRMLYTKQEWLKTQQEMNDIFSDVPEALSNTLEILDKVEFYSIDHPPLMPTFPIPENFGTEEEYRKKFTEEDLFNEFTRDENGNVVLDEAAAHKKIENLGGYDKLYRIKLEADYLKELTFKGAHERYGEELSDEIMERITFELHIMKTMGFPGYFLIVQDFINAARRELDVSVGPGRGSAAGSVVAYCLKITQIDPLKYDLLFERFLNPDRISLPDIDVDFDDDGRGRVLQWVTEKYGAEKVAHIITYGTMATKLAIKDVARVQKLPLPESDRLTRLIPDRLPEKNGKAQKINLKNCIENVKELQEACNSSNELLANTMKYAQMLEGNVRNTGVHACGVIIGRDDITDWVPVSTADDKETGEKMLVTQYEGSVIEDTGLIKMDFLGLKTLSIIKEAVENIRQTRHIDLDIDSIPIDDPKTYELYSAGRTTGTFQFESAGMQKYLRELHPTTFEDLIAMNALYRPGPMEYIPQFIARKHGKEPIVYDIPIMEKYLKDTYGITVYQEQVMLLSRLLANFTRGQSDGLRKAMGKKLKDKLDALKPLFISGGEKNGHKKEVLEKIWADWEKFASYAFNKSHATCYSWVAFQTAYLKANYPSEYMAAVLSRNLNNITEITKFMDECKSMKIQVLGPDVNESQYKFSVNKKGNIRFGLGAIKGVGDSAVQAIVKEREANGPYKGIFDFVERVNLSACGKKTIESLAISGAFDSFKEIHREDFTALNSKGEIFLETLVRYGVKVQNDKMSQATSLFGSVAPIVTTPPEIPRGVPLSDIERLDKERELVGMYLSAHPLDAYKLELLYGCNTRMTDLKDRESLLNKELTFGGVVVDYRTGIGKRGGQYGFLKIEDYSGAEDIPLFGQDFIDYGKYGANNGTFVWIRARCQPSKFTPGRIDLKILEIKLLSELKGTLLNSITIELPARLVKNGFIQTLSEFMPPAHQHKAELSFKIYDSELDKSVRLRSRRKPTITEELIDFLSENDEVSFKINEMALKINDENAKELIASGKPVVIDFWAEWCGPCRAIAPSVDELAEEYEGKVIIGKYNVDDDADLSAEYSIRNIPTLLFFKEGKLVDKHVGSASKADLEAKIKALLMLKELDPLLHSQLRLAVMSILLSVDEADFVYLKEKTGSTSGNLSVQIDKLSAAEYIRVRKEFVGKKTRTSCQITEKGREAFEAYVNTLKEYLNWMEEQKMNEKESLELIAQMIRVTKQSIGSGCGNKFLMYGYTAAILSIVIYALVYFTGNSAWSAGWFLMFLPFLVSSVREKRNRPKVVTYTDRMINETWRVIGALFVLTVLTMIVLGFVIGRVNFGLMMPLALLYCGMGTSITGLVIKESSLTYFPLLALVTAIYMFMTMPSLHTPMVWQLYFGGSFVVVMIVPGHILNAKCKKICMIYFSLARETTDLLCYTIFHTLIDKRRKEISLFSTKTFYKSSLYKTFLSSRFISKGETKTVLSIINGMGFNDLLKKLFGNKSQRDLKEIEPYIQKIKAISPELEKLSNDELRHRIDVVKQHIQDSVADDRKRIAELKEHVETLDYDKRESTWEEIDKIEKEILKKIEDVLDESLPEVFAVMKETARRFSQNETVEVTANDFDRSLAVDHDFIHIEGDKAIYANHWMAGGNEVVWDMVHYDVQLIGGVVLHKGKIAEMATGEGKTLVATLPVFLNALSGNGVHVVTVNDYLSKRDSEWMGPLYMFHGLSVDCIDKHEPNSEARRNAYNADITFGTNNEFGFDYLRDNMASSPLDLVQRMHNYAIVDEVDSVLIDDARTPLIISGPTPKGDDQMFEQFQPKVEELVKMQRNLVTKLLAEAKIKIASDDKKIREEGAVLLYRCFKGLPKNGALIKYLSEPGIKPLLLETEAIYMADNNRRMPEITDDLYFVIDEKNNGIDMTDKGLDVMTGKSDDPNFFVLPNISELLSDLENQGLSPEEKQAKKDGILQDYAIKAERVHTVNQLLKAYTLFELNDQYVVIDNKVKIVDEQTGRIMEGRRYSDGLHQAIEAKEHVKVEAATQTFATITLQNYFRMYHKLAGMTGTAETEAGEFWDIYKLDVVTIPTNKPVARIDMNDRVYKTKRAKYNAVIEEIVKMVEAGRPVLVGTTSVEISELLSRMLTLRKIKHNVLNAKLHQREAEIVAQAGQTGTVTIATNMAGRGTDIKLSPAVREAGGLAIIGTERHESRRVDRQLRGRAGRQGDPGSSVFFVSFEDTVMRLFATDRVVKMLDRLGLKEDEMIEHNMVSKSIENAQRRVEENNFGIRKRLLEYDDVMNAQRNVIYTKRHHALMGERIGIDIMNMFYDTIESLADTYDGTSDYEDLSMEMFKIFAVEMPFDEEKFRSMKKSEVIDSLYEAVVATFKRKGDRMAEIAHMNIKPFVEQRGLSTGMIRVPITDGKRVFGIACDINEAYKSESQSVVKQFQKAVLLMTIDEAWKEHLRELDQLRQSVQNASYEQKDPLLIYKLESFNLFKEMVETMNRKAIAVLMRGQIYIQEPQDVREAAPERREDYSKYRTQKDDYPGQSAQAAAAAAPQQPRVTEPIKAAPRVGRNDPCPCGSGKKYKNCHGKGLMKNKVLATILFSLLVVPLVQSADNSPRLVVGITVDQLRTDYLEALQHLFGEKGFKRLMREGVVCENLVFDFPNIDKASATATLYTGTTPFFHGIPSERFFNTAFLREEFILNDPSKIGNYTDETFSPERIRTSTLSDEVKIVSGGLGRVYAVAPDAQQSIISAGHAANCAFWINDRNGKWATTTYYRDVPAYVEQFNYVRSLSARIDTLSWTPVYTPDRYTAIPYLTNDFSFKRTFARDGRDKFVQFKTTALVNQEITDVAVEFLDKGLLGRRGVLDMLNVGYTAGVYLNKTIQDYGLELQDTYVRLDRDIARLLDEIDKKVGLANTVVFLTSTGYFKGEAKESPIYNIPSGEFYPRRAVSLLNVYLMALYGQGDWVIGYQNRQIFLNRKLIKERDIDADEMRNRAASFLIQMTGVQDVYTSQRLLLSNGTDRVAAMRNGYYPKLSGDLVLDLCPGWEVVYEDANDTREYVRVNAVPAPCFILAHDVKPVRITSPVRATAIAPTVSRLLRIRSPNGSADAPLPEIQYMKKKLCIILGFILVALFSNEKIQAQESKPGILPDTLQVSLLTCGPGTEVYELFGHTALRVKQQRPGGFDYVFNYGMFNFDVPGFIWRFTKGETDYCLGINDFPDFLLNYQFRESKVDEQVLNLTPIQSRALFEALLVNAMPQNRVYRYNFLFDNCATRPRNMVEMVLDNKVRYKEPGESLPTFREEIDRYAGICPWLIFGIDLALGSGLDRPMTYREQMFGPEILEKAFSEAVVQMSPDSAAVPLVSRTEVLYDPEVPACPPETPFYLTPLFVAWLFFFFVAAVSVYDISRKRYSRVFDTVLFSIYGLSGLVVFFLMFVSVHPATYPNYSAFWLHPFWLLMALFIWFKSLKSIVRYYHFANFAGLLLFVALWHWIPQQFNAAFFPLVLVLVIRSFTYLAVSVRLKKTEKNKDEKMKIKGLLLSLFVTSSLLSIAQDIKLPSPQKQGGEPLLQVLSKRASTRDFDTQKNIDSQTLSNLLWAAWGYNREDKRTAPSAMNRQEISLYIVTAQGVYLYDAKQNKLAEIAKGDFRENAGMQPFVHTAPLNIIFTADLEKAPGNDMMFVDCGFISQNIYLYCASVGLGTVVRGSFNGDELAKILKLNEKQKVVLTQTVGYPAKMISPEKPYIMRRFSFLFFTIVIFLSFLSGCKGKQVESDYPESSLIDTFEVKQQPQPRTTGWKKSPVRYSSFRKLFNDLNDKHLAVAKKNGIEPLESLDDARNLGFWKLAKIDSCEYYTVDKLTHSIPYLTPKTKWLLMKIGKNFQDSLTNRGSGGRQIILTSALRSDESIKSLRRRNTNASENSAHRYGTTFDIAYNRYNVTDSTYFVPSDRLRILLGEVLYDLRKEHKCYIKYEIRQGCFHITARMKRYLYALRYLISIHVLGLILFTAFRLILFLQGYEYLMDEEISVFTRLEAFVRGLWLDNVVACYISILPLVIVSLCSLIGYFGKNLYRGIHIFFSVFYVVAFAISAADIPYFAYFFKHINASIFNWFGYTGTTLGLMFGEFSYIVAFVLFLCLSFLFVFLSRILLHRTCRDIQRVSAEKFHWKPELLTLLCSTLLIGVCLFGIRGRMGYNPIKVSAAYYCNNTFLNQLGISPSFNLLRSSLEASKSENREIDLMDEKEAISTVRRELNITDSLPDISPIARKIENPGQPSSKNVVLVFMESMSAELLGHFGNPEHLTPFLDSIAVRSLCFNRFFSAGTHTNHAIHSVLYSYPALMKRNSMKGAVIPFFAGLPTILQDNGYRTLFFMTHESQYDNMNGYLRTNGFDRIFAQEDYPKDKVVNSFGVQDDFLYQYALPILTETADEGQPFFAVLLSISNHPPYVIPKDFKTHSSTDEHRIVEFADHALKEFIDEAKQQEWFDNTIFVFVGDHGKIVGTPRSDMPLSFNHVPLFIYSPSFIEPRQIEDLGGQVDIAPTVLGLLNIDYTDNGFGVNLLQEKRKAAFFTSDDAIGCVNDSLFYIYKPKENQEWLLSQERAIEKGGNIDNPAVCQELREYAFSMLQTAQYLMSNNLTGKYIGYQPRMNKIFYTFVLSALVLLSVQCNPKSQESDEQLENDSIIEYAELLSITCHDDYTDVKISNPWDSARLLHRYILVPKTQNVPSNLPQGTVVRTPLSNTLVYASVHCSLLEQLDALSQIGGVCDLSYIKTPALLSRAENGKLTDAGNSMSPDIERVMSLNPDAILLSPFENAGYGRIGKMGIPIIECADYLETSPLGRAEWIKFFGLLYGKEVEADSIFTEVEKNYTELRDKIGVLSSAPVVISELKSGSAWYMPGGKSYMARFFKDAGAAYPWSDNTETGSIPLSFETVFNRAGEADIWLIKSFHVSELSYRTLQKEYAPYARFKAFREKKIYGCDSSRCNYYEETPFRPDLLLQELAALFHPGLFPDYRFRYYQPLSEMNDKPNKQHEQRLIVVLVLLLLALCAANLWFGSVQIPASAVWDILCGKEPEKEVWKFIVLESRLPQMAAALLSGAALAIAGLLLQTAFNNPLAGPSILGIDTGASLGVALVMLFWGGTLGVSEATTLTGFTAIIAGAFLGSVTVLGTILFFSTIVKNNIMLLIVGIMVGYITSSVISLLNYFATAEGVHSYTIWGMGNFSGVTGEQLPYFALFVSVGLIIAILLIKPLNALLLGDRYAANLGVNIKLTRNLLLIVTGLLTASTTAFCGPISFIGLAVPHIARLLLGTSNHNTLLPMALLCGAVTALLCNLICILPGESGILPINAITPVLGAPVIIYVIINQRKIQYFNMEEQTNILSAQQLCIGYKTGHGHVKQVHGDLSFSLRKGELTCLLGANGSGKSTLLRTLSASQPSLSGKILLNGNELSVMSEREISRQIGVVLTDKTQTGGLTVYELVALGRQPHTGFFGKLDRQDRQVVDEAIEAVGISHKAHSYMAQLSDGEKQKAMIAKVLAQECPLVILDEPTAFLDVVSRIEIMTLLHHIATAQNKAILLSTHDIEQALVLADCLWLLRKGHGMRSGITEDLILNGELDTLFDRKEICFDRAHGSYYPSVQWEKEIVVDATDETLLHWTVNALNRNNYGCRISPCEADASLPRLTVERNDSLSLHTATNEVRFTSFAAFIAYLKTPTQKGMKYYLIAGEASGDLHASNLMRALQQEDANAEFRFFGGDLMASCGGTLVKHYRDMAYMGFIPVLMNLDKVLANMRLCKQDIAVFRPDVVILIDYPGFNLKIAKYVKRRLGIPVYYYISPKIWAWKEWRVKSIRRYVDRLYSILPFEVSFYAKHDYTVEYVGNPTVDELAVRPYADESFEDFTAECGLGKKPIIALLAGSRVAEIDHNLPLMIEAAKTFHDYQLVIAGAPGISPDQYAPYLQDRSVKVVWGKTYRLLQQSRVALVTSGTATLETALLRVPQVVCYRLGGGKLFYKTFEKILKVPYVSLVNLIADSPVVCELLGYRATPENLRRELTSLFEETTRKKMLAGYDLVAERLGAPGAPKNAARSMVAVLRTRMAMLMTTTPSVEGKQIVRYLGVVTGETIIGANVFRDFLAGVRDFFGGRSASYEAVLREAKDTALEEMARQAEALGANAVVGIDLDYETVGGSGSMLMVTCSGTAVRVEMKATTFALILLSILTGTCLTSCIDDDFTTNPSHVLAFSTDTVAFDTVFTTIGTSTRSFRIYNRNKKSLNISSIKLADAEHSGFHINVDGMSGDNFTNVEIRGKDSLYVFVEANIDPTNQDNPIFIVDSIVFVTNGVQQDVKLTAYGQDVIIKRGETFTTDTHLTDERPYLIYDSLVVAPGTTLQIEPGARLHFHHRASLLVQGKLQVEGSMEAPVQIRGDRLDRLFADLPYDNLGGQWGGIRFYPESFGNKISYAYVRGMTSGIVLDSCASEEPRLEIANSRIRNSSGNLITSAYSRLNCWNSELSDAGGAILSLTGGIADFTHCTIVNYYFYDIITSPIVNMSYCAPADTISGGPALLRARFNNSILYGNTSEIPSIDLTGSHVYFRSCLLRSNGEDDDNFINTVWNGQPFFKATGEEHYYYDYRIGSDKSDAIGKGNPDFAIFPLDKDMYGNLRSTSVDIGAYQYIPQEIPEEMSEEIRQIAERLVGLRDALDLRPEDIASTCNINLETYLGYESGEKDIPVSFLHQIAKHYGVELPALMFGYEPRMNSYFLTRKDKGVAVERTKAYKYQSLAAGFANRKADPFMVTVEPSAPEAPFTLNTHPGQEFNLVLEGSMHLRIGEKELVLNEGDSIIFDSTRPHGMKAIDRQVKFLAIIFMLERFLDKTSFSSQEDFMKNFKVKVPDCFNFGYDVIDEWARIAPEKKALLWTNDQGKRIDFTFADIKRESDKTASYFQSLGIGHGDMVMLILKRRYEFWFSIIALHKLGAVCIPATHLLTEKDIVYRCNAADIKMIVSCGDGIVVEHINRARPSSPSLQRCVSIGPIIPEGWDDFHKGIESAAPFVRPESVNTNDDISLLYFTSGTTGEPKMVAHDFTYPLGHIITGSFWHNLHEDSLHLTLADTGWGKAVWGKLYGQWFAGANVFVYDFEKFKPADVLEMIHNFHITSFCAPPTVFRFLIREDLTKYDISSLKYCTIAGEALNPKVYEEWLRLTGIKLMEGFGQTETTLTIATYPWVEPKPGSMGIRNPQYDIDLLTADGRSAEDGEQGQIVIRTDHGKPLGLFKEYYRDPQKTYEAYHDGIYYTGDVAWRDEDGYFWFVGRADDVIKSSGYRIGPFEVESALMTHPAVVECAVTGVPDEIRGQVVKATIVLSAAYKDKAGEALVKEIQDHVKKVTAPYKYPRVIEFVEELPKTISGKIRRVEIRDKDKVMQISNDWFVAETEFENKSLIIRGRLFLDAIRQSGKFATRIALVWEYQGDEKGMPTEKETQALDSLNEKLRDILEEKEIAILTAIHIGGKTARYEYYGISAEKFSIVLNETFSEYPPLPIKIGAESDPEWNNYIETIQQFAMQPMSYKRKRITVKIGSNVLARPDGTLDITRMSALTDQIAELHKAGVEIIVISSGAVASGRSELKIHRKLDAVSARQLFSAVGQAKLINRYYELFREHNIACGQVLTTKENFSTRRQYLTQKQCMEVMLENKVIPIVNENDTISVTELMFTDNDELSGLISAMMDSETLVILSNIDGIYNGAPGQADSKVIPEIHPGQELSQYIQSGKSSFGRGGMLTKCNIARKVADEGIEVIIANGKKENILPDLLRENSSAICTRFIPSANPISSIKRWIAHSEGFAKGELHINAGAVKAIHSQQAVSILPVGVTRIEGDFEKDDIVRIIDPDGNSIGVGRIAFDSETAREFIGHQGAKPFVHYDYLYLDMTADVSHIFENARVAARKLNLVDTETIDKILLAVAYEAEKEVDYILQENCRDLALMPKTDPKYDRLMLSRERILGITSDMRKVAGLPSPLGRILASFDRPNGMRIEKVSVPFGVIGIIYEARPNVTFDVFSLCLKSGNVCILKGGSDAQYSNNAIINIINKVLISYGIDSNTVTLLPNGHSFTDKLLTAVGQVDLIIPRGSGRLINYVREHALVPVIETGAGICHTYFDSDGDLEKGRNIVFNAKTRRVSVCNALDCLIIHKERLSDLANLCKPLSEKNVIIYADPKAYGALAGKYPESLLQPATDDSFGTEFLDYKMAIKTVDSFEEALAHIARYSSKHSESIITENESHKQRFAHEVDAACVYTNVSTAFTDGGQFGFGAEIGISTQKLHARGPMALPELTTYKYIISGNGQTRQMRHFTNVHDLGDLNAAVKEALEVKSNRFAYKHLGQNKTLMMIFFNSSLRTRLSTQKAAMNLGMNVIVLDVNQGAWKLETERGVVMDGDKPEHLLEAIPVMGCYCDVIGVRSFARFESKSDDYEEKILNQFIRYSGRPVFSMEAATRHPLQSFADLITIEEHKKTERPKVVLTWAPHPKALPQAVPNSFAEWINQTDYEFVITHPEGYELAPQFVGNAHVEYDQRRAFEGADFIYAKNWAAYADPHYGQVISTDRAWTVDSEKMALTNNAFFMHCLPVRRNMIVSDDVIESPQSLVIPEAANREISAQVVLKRILESLMKRLLTFFLICFSFVEYTRAEDIIDYKYWDEGKLTWDDFQDTLSLKGVPSTFNAFLRIEKTEKRDGNTRTIRPEAQACFDKRHSFADRQIQNENLLRLFQLKYDLLEMYRRRLQTELNLGVVGIAADNRTRQYMDLYTEQSKKAEQETENGQNEIKLQEWEFYVTKELIENPAPSIPRISPRRFGYGFYLGTGASFPVGNIADYWAPAWQINVGFDLAYANTHLLCDFSAGTARTRQEITVSNGQITDTWLRNGHNTYTSISLGIGQQLVSTKYFALMPYAGCIWSGYSDQAKIQEGRNERTTLSYTNFNWTAGICFDYRFSTTISLVPSFWRGHREIFTASIRTKLFINREQFHNFKIAPDDNGSMLRGCKLGFSVACLGFSRLLQIKMKQYLDLLQHVLDHGILKEDRTGTGTHSVFGYQMRFDLQDGFPLLTTKKLHLKSIIHELLWFLKGDTNVKYLQENGVRIWNEWADENGDLGHIYGYQWRSWPDYNGGHIDQIKEAIHTIQNNPDSRRIIVSAWNVADLPQMNLPPCHAFFQFYVANGKLSLQLYQRSADIFLGVPFNIASYALLLMMVAQVTGLEAGDFVHTLGDAHIYNNHIEQVREQLSREPRDLPKMKLNPDVKSIFDFKYEDFELTDYNPHPHIAGKVAVMSKIALIAAVAEKGAIGRDQQLLCHLPNDLKHFKTLTSGHTVVMGRKTFESLPNGALPNRKNIVLTHNTSLSWPNVTVVHTLDEIPIQDTTEDEIFIMGGATLYNETIKIADTLYITHIHHTFDDADTFFPTINPSEWKIANSQEMPADEKHAYPYTFVTYTRRRIENRESSDKMKTFLWSFILFAGLAGLSACDEDERVDYQYLPDSVHQFVSTYFSDVKVVKAEKKNEEPRYKVWLSNGFELKFYKDGGWQKVDGNLQVLPSALQIDILPGNLLTYVATQYPTAGIVEAARYDWGYEVELNTAPLVELEFDNDGNVRQIDRDMYAYNFIYKQNTQEKTIIFNIIFVISDFYSNMLDLYYKSVTFMKKALLSIALSAFVFSLIAGTGLSADSPLTVSQALAKKNDRKSYYINGYIVGEYRDYSNNKHFYNIAPPFDGTSAYLIADEIDEIDLSKMMPVQIKDYVDSYNLDENPQYWRKQLTIKGTLTDYFTLPGIKNLTDWIAPGENVTDETKYWNFYETFETKKAYTPNSTLMYGGGIYASAETCRWKFVGATYGDSSNDMKWDNAAAHLRLTESTSGEPGYIYMLEDKSNGIGYIRLWAARYKDDKGSGSFGVYISNDKGKTWEPIQTSIPIKKELTEYQFKVMRPGELRIKIGKTENSTTGIDIDNIHISDYYTTSSVENMLSPTNIRIWSSKGHLCFDTKMPEQIDIYLINGTLVKTEHIIGSGNIALPAGFYIVSIKNTATKIIVPMKRLGLWGAIISLMLLVSCKKNTESVDVCIYGGTSAGVIAAYTASMEGKTVLLVEPGRHLGGMTSGGLGYTDIGNKFVVTGLARDFYRRIGNHYGKFEQWIFEPSVAENIFKDYVERGNVEVLYSHRLNEVKKDGARISEIVVENSENPSPKTNKQIRAKVFIDCSYEGDLMAHAGVSYTVGREDNSVYGETYNGVQMMRGHQFWDPIDPYVVPGDSTSGLIWGVSHDVLQPIGTGDKKIQAYNFRVCLTDDPNNMIPITRPDNYDSTRYELVLRLHAVSPRKSVYDYFIWSRMPNSKTDINNGGGISTDMIGMNWDYPEADYDRRAEIWKAHEDYTKGLFYFLGHDERVPEFMRIEMLKWGYPKDEYVDNHHWTHQLYVREARRMIGDLVMTEHHCVGKEVVDDVIGWAAYTMDSHNCDRIVVRGEVKNEGNVEIGGFPPYPISYRAITPKRREVTNLLVPVCLSASHIAYGSIRMEPVFMVLAQSAAVAACLSIDNGIDVQDVDIARLQEVLKTDPLSDGSVPEILVDNDDKSCVELNGVWNFNFDTYRGYGLNFLVDDSKGDTLKTVKYIPDVQVVGEYEVYMFFPRLESAATYTSVGVYDGKNMEEKQIYKDDVEVVGQTGGEWVYVGKYTLAKGRDAYVEISNKGADNVVAADAVLFRPVKKMKKIYFVTIIFVCYFFFCSFSQQPVYLDETKPVDERIEDALSRMTLEEKIAMCHAQSKFSTPGCPRLGIPEIWMSDGPHGVRMEFVWDDWQHAHWTNDSCTAYPALTCLAATFNPELSYRYGKALGEEARFRRKDIILGPGVNIYRTPLSGRNFEYMGEDPYLSSVMVVPYIRGVQENGVAACVKHFVLNNQEKWRDTINVVVSERALNEIYLPAFKAAVTEGGVWAVMGSYNKYKGEYCSHNDTLINEILKKEWAFDGVMLTDWGSAHNTNEAALNGLDLEMGTWTNGLTWGISSAYDKYFLAKPFLEKIKSGELPESLLDEKIRRILRLCFRTNMNRQRPLGRKLTEEHTDIARKVAEEGIVLLKNEKDFFPIRPGRYKKIAVIGENAVKKLTEGGGSSELKAHREVSPLQGLVDKYGAEHIVYSMGYASGAPDYSRELPSGYDADSLVRSAVAVAKAADVVLFFGGLNKNFQQDCEGDDRKSMDLPFGQDKLLDEILKVNKNVGVIIVSGNAVSMPWLDKVNGLMQSWYLGSEAGNATARVISGEVSPSGKLPFSIPRRLEDNGAHYFGEKSYPGDGKTIYYMDDIFVGYRWHDTRKIPSLFPFGYGLSYTEFKYGEVSTDRKVYAEADTVKVLVKITNTGSMAGAETVQLYVSQDSPSLSRPVKELKGFRKQFLNRGEEKTVTLEIPVKDFALYDDRVSRWVVEPDKYTLQVASSSRDIKGAVEIEVIKMKKIILSLFVGLFLTGCEDFLDSEPTNLKTIENYPATQEDADQVLTGIYSVLAMPDPLQTSFLSSELRSDNLLGGGGPTDISTKAIAQCQKWSESSFAVAWRTNYMGIFRANVFLEALDKVEWNSEEDRKRMEGEARFLRAHYYFDLSRMFGDVCLITTSESVNIPRTPAAETYAFIAADLKKAIEDLLPTERYDAVESGRVTKWAAQALMARVFLFYTGYYQKESLPLPDGGEISKDQVIAWLDECTDTSISGHDLVSDFRNLWPYSYVQDYKFTKNNNLKWEGDGNKETVFAIKYSNKFANWDYPYQKSNQICLYLGLRGQNYLRTFPFGQGWGFGTVNPKIWEDWFDDDIRKTGSIFNVTNRNEVVLYTFGADSHVDETSYVQKKYIPINVYADGTHTVVHNYSMELYGNTVDNYMLNNTQDLVLIRFADVLLMAAELNLGTAKAQSFLDRVRARVNLPSVPATLDNIKAERRFELAFEGVRFYDLLRWHDADRVLNENQKDIVIYRSRTETVTKTITYRPETNGFLQIPLSEIELSKGVLTANPGWGSEAAYQDIYMDLISVNNFRRKRSLRYFALLFFFLMMCPSMVSAQNTVTIGGTVSSKGEPLIGAVVKEKGTTKATATNIDGVYSLTVQENAILEISYVGYKTKEIKVNGQKMIDIELEENVNMLDEVVAIGYGVQQKKLVTGATVQVKGDVIAQQNTVSPLSGLQGLTPGVSIVKNNGKPGEGFNVLIRGAGTMHDSEPLCIIDGQPGDLNALNPSDIETVDILKDAASAAIYGARAANGVILVTTKRAQKGKTNITYDGYVGIQNFRNNVETTGARDYLMLLQEAGLITEADLNTERVPMLDKINNGEWDGTNWLDEMTQKNAPIQNHAININKGSENSAFTMGFSYTSQKPTVAVPDDEVGSGFDRYTIRLNSEHTLIKLKDLDLLKVGETMTMVYSDKKGLDQATGQTTWNDFRNAFKTSPLFPAYDEATGEFADPVKINKDEFNPVAKMYYNSAMKQSKNYSLNGNFYLILEPLKNLRWRNNFGIRYSSWSYRGYVPAYNLNGSTEVKYRNTVTQQGGMGLGWQFESTLSYDFSINNQHKFSALLGTTIDKSGLGENYSGSNEDVEFDDFFHAYLGNAKTVEKGRTTLSGSAWGVSTLASFFGRINYDYQNKYMATVIMRADGSSNFARGHRWGYFPSVSAGWNVTEEEFMEDAKSVLNYLKIRASWGENGNNKLDAFRYLGTMALANSQNAAYYYFGDKSGTPFIGSFIEYNSNKELTWETSRQTDIGFDMMLAGNRLGINFDWYHKKTVDWLVQTNALGIWGTPSGPWVNGGDIVNKGVELQLSWNDHIGDFRYSVSANMGYNKNEVVRIANADQYIEGSENILGSGTGRFYRAEVGMPLGYFYGYRHDGIFQNQEEINGYISPETGKPIMPDAKPGDVRFKDLDHDGAITTEDREMIGDPNPDFNYGVNLNLSYKALDFSIAGYGVAGNQIVKSYRVNSVVNTSNYTTDMLGRWHGEGTSNWLPSLNGTAINWQYVSDLYVEDGDFFRITNITLGFDFKKVFRKIPLQKLRIYVSGQNLFTFTKYTGLDPEVSAYTGAQSWARGIDLGNYPAAYSFMFGVNIHYMKKKIFTLCLFAAFILNIYSQAPESFQYQAIVSDNNTTLVNTDVSVRFTIREKTATGTKVYSEVHQTKTNSFGMVALQVGKGTVETGDFTSINWGKGSFFIETEIDKGAGFVSTGAQQLMSVPYAKYANQAGKITLTSASGKKFTLTIDDEGNISTQKITEEMKKILFLLLLFPLSLRANILISTACSEGGSTTWTIGEIMVATLSDNNSEKSLTQGFLQPEHIVPSGIFDIPEKATQITIFPNPAKEKVFVKIDEPFTWSIYDTLGKIQSTGKLSGTPGEYINVDNLTPGYYILTITSSKGSSSIQLIKMKNHILLIVSILTVISIKGYGQNGFPYQAVLRDNTGTTINNQNINVLFSIYQGNDETPVYQEEHSTTTNAAGQFSLEIGAGHSLIGDFQSIDWSKTPSFIQVEADYGSSHRLIGRQELLSVPYAQYADQSGTLQTTSKSGKNYQLTVDDLGILQVVEIPEGYTKLVFQDEFNGTGLPDESKWGYEVGFIRNHEMQYYTERRVENVFQKDGILHLRCISEDTLKNEKGEILNKNITDGKEYYITSGSITTKGKHAWTYCRVEARLKVPQASGTWPALWMMPSDNVYGYWPRSGEIDIMEYIGNDINKFYCATHYLNGDKGSNKAVDNINDWHIIAFEWHEDRMEFYCDGRMFYRILNPDTNWGDWPFDQDFHLILNFAFGGGWGGEKGFDTSVLPLDYQIDYVRIFQMKKKIFYSLLICAASSVYAQTGNEISGKYTKLVFQDEFNGTGLPDKSKWDFENGHLRNSEKQYYTTDRLENAYQKDGYLHLVARNDSSLINGKVRPITSASIHTKNTFSLKYGKVEVRAKLPACLGTWAAIWMMPVKSTYGYWPKSGEIDIMEHVGYDPERINYAIHTESNNHTKKNGKGSNAFCPTCYTDFHIYGFEWHKDRLEWYLDGRKRLVITKPENATWESWPFDQPFYLILNLAFGGGWGGLKGLDTDILPQEYIIDYIRVYQMKKTFSLFLAFALGVVVPQTFAADYYVSPTGDDKAAGTSAETALKTIQAAIEKLEDNTPTTIHLEENATFDVYGPEAIIIGAKKNVVLRGKNTTLKSGDQPFLGDRVITIGTNTDATISGLILKNGCTRDGIPGGAIFFEGNELIVDSCTFINNEANNSGGAIASCGKNVTITNCVFDENRIFGGYGGAAIIYHCGLPNNAEEPGALIIRNTAFTNNISKADAKGDIIGFHYAYRGSEYTPLYSNVNYFELTNCVFKDNEPGVSPSVRPAASDIYINNVREDFEMNLINNTFYKTKAVAIPFFYETPYRIINNIFYNDKDFTIMSSNICGERDPLIAYNNVFVGGLGENMDDPALNAEKEKYGNVVLDAVELNKLGLTPRLQDDNYVPYLPITDESSILINKGLSSTSGMEGFDKELIPATDIRGLATVDGKDIGSFEYGSTSGIAGITADKQASFVIYRNGDEAIVRNLTDQTLNLSIVLLDGRTIYNAALKDELTINKSELEIPNGVLIFTVNNGNRFESQKVILFMININVKFAAATLFLMGSSWTISAQELSISHATVGSLETEITEALDGADISSVTKLTIFGESLDNTDATYLKTTFKDHLEELDITGITFIDNSVTDKLCQKMTTLKIVSLPTDLTKIGKYAFDGCLNLETVNWGLVENIDDYAFQNCAKLKLNSLPENLTRIGQYGFSKCAEITISQLPDQLTGFGVRAFEFCSKLTINKIASSVTDIKERVFDRTGITDFTFSENIANIGNLAFFVEGNPTRTFTCRKETAPKLGDRSFGAASGISNTTVKVLKKYADSYTAWSTAGMTLDYLTHKVNISVKSNGTIEANGSGLVSENNSIEDGTTIEAYEGESITFTVTPAATVKLNGEEINPDEESQNSYTIAINEDDINLEIDFSVSTHIEKLDDTVTSCNVKQKILYITGKLTTPVIVFNCVGNQVISTQEPIIDLSLLPTGIYIVKANHQTFKIINKMIVKEMKRMALCLFLLLFAGSVWSAAKEDRTEQRVDSVLRLMTLSEKIGQMNQVSSKEDPTGQLTECSNEEELIRSGQVGSMLNVVGVERTRHLQEIAVNDTRLHIPLIFALDVVHGYKTISPVPLAESCSWDMDLIEKSARVAAEEATASGIQWTFAPMVDIARDPRWGRVMEGSGEDPYLGSAIAKARVRGFQGTDLSAYNTMAACAKHFVGYGAAEGGRDYNTVDISKQRLRELYLPPFSAAADAGVATFMNSFNEVMGVPATGSTYLVRDILKGEWNFPGVVVSDWGSVAELIPHGVAEDKCDAAQLAVTAGCDMDMEGYCYVSSLEKLVLEGVVSESLIDDAVRRILRLKFDLGLFDDPYRYCDAEREKAEILSAEHRKVVREMACKSIVLLENREGILPLDNRCKNIGIVGPLADNPDDMLGSWCARGDGKDAIGILQGIKQAVGKGVRIRYAKGCEIEGDDRSGFSEAVQVAENSDVVIVCVGENRFMSGEAASRTRLTLPGVQRELLKAIKETGKPIVLLLSNGRPLVLDWEKENIGTIVECWQLGSEAGNAIADVLFGKYNPSGKLTMSFPYNEGQIPVYYNAKSTGRPYVPNVRYVTRYLDCPNVSLYSFGYGLSYTRFEYGELKLDKDTMFPGEKLRIDVSVANVGNYDGEETVQLYIRDVCSKITRPEKELKGFKKVFLKKGERTDISFELSLADLEYVLADGSRESDPGLFEVFVGGNPDDVKKAEFILVQGDKMWSFPKAIFCLCLPLVGWLSACNETKSVTNFAWTVSDERASAELKDFCHDLTSRLEAGIMLGHKDALAYGSMWYNQPGRSDVKSVCGNYPAVVDWDLGGIESGSELNVDSIPFFRIRQYVEQVYRRNGVTILSWNPSLSFLLRKDSLQNVVRSVLSGNESRVEYEQYLDRVAVFLETLKNSDGRHIPVIVHLFHSPNLASMDWGMGHCSPEDYVRLWHMTVDYLRNKKNIHHVLYAYSMYGIVSEEEISQYYPGDKYVDIVGLNLYQDFESDESGSLYKQRLNMGLSAMNRFAEANKKLPALTDTGSKGVKISNFFSSILDPVISKYKISYVVFGPNMWNEEESYYIPIPGHPASEDFSKFAHSPHIITCEKADLMMNTKRLFLFICSLFCFILVQADTDKFFGSNNQLSNSHVNHIYQDKKGYIWICTENGLNVFNGIDFNTFTHIANDSTSLANNSVLSVLEDKKGRFWVGTTDGVQILDRETGKFQKVNLSYRNITNFSYIKCITEDSKGNVWLSTNRSGIIRINENSMNAVYYMQTNSNICSNKINTIYEDRFGNIWIGSQDNGISVLNVDNHTIVNYSHDPTNPNTLSSNKIFSIIEEPSGKILVATIDGTIDAFDFKERSFQRNYIPSVEMVYTLYTDSKKNLWIGTDGLGLKRYNFKDKTITTYESELINLDMRKAKVHGIFEDKQHNIWVALYQKGILMIPLKDKIFKNIGFNPFYTNKSIGNECILTILEDHTKDIWIGTDGDGIYRLNADRKVKAHYKDGKFPANVVLSIFEDSRKRIWIGTYLYGLYLYDESTNRFEKKNLRCNNTEVKHVNAIAEDEKGNLWIGTNEHGVCKYNPKTENADFLLYDLMKSKNQILSNSVNAIAIDSNYIWIGTSVAGLSRYDMSNGSFEDYTAENGKLSNNNIFALKVDHRGGVWIGTNWGLNYINPNTGKILQYTEKDGLPNAAISGIEIDAQNHLWISTYYGLSHYNPQRNKFTNYYTSDGLVNNEFRRGAYFQSISGEIFFGGINGLTFFYPFESQPSYNLSNLIFTDLFIYNEPVIPGESGSILKKSIDYSDEIRLNYNIKNFSIGFSALEYNNPNNVIYQAKLDGFEKTWTTLPNGNNTVTYTNLKPGKYTLYIKAHLPHTEPISRKIDIVITPPLWLSWWAKGIYILVILVGAYCTYINIRNKNLRKKEDLQKKNESKIMQSQLQFFTDISHEIRTPLTLILTPIEELIKNTTDEKLKETYKIIDQNGHRILRLVNQVMEMRKLDKGQVKLLAEETDVNIFIQEIIGSFKHLAQEKNISFDVHIVDNLPFVWIDQEKLDKVIFNVLSNAFKYTPTNGKIGMVVDTTESFLRIRISDTGCGIPKELRETVFNRFYQVPNENNKIKMGTGIGLHLSRSLMEIHHGKIFVEDTEQPGATFTVLLPLDESYLKEEEKKLEHSDRNLATLVQTSVAPFFSNETSSNTLSPQNKYKPKLLVVEDNQEIRNYIHKVLSTEYQIIEASNGKKGLEIAIKENPDCIISDVMMPEMDGIEMCDKIKKNEQTSHIPVIMLTAKTAIEQRIEGLKAGADSYIPKPFNIEHLKIRIRKLIELRRIMKNKYEGKFNEIKEEVTNIKSTDEKFLEKLENIVKNKIAESDLSVETISQEIGISRSQLQRKLKQLTNQNPSDYIKTTRLRHAAWLLSCKNLSVSEVSYATGFSSLSHFSNSFKEFYGMSPSHYMEIHRSNRDSEKPKTEKMAVTMAEISKLRKLTGAGMMDCKNALTETNGDIEAAKEIIRKKGQAVAAKREDREASEGCVLAAAKGDFAAIVALKCETDFVAKNDSFVALTKSILDAAIEAKATDLETVKALVVNGTPVANLIVDEIGKTGEKMELGYYEAISAPYTTAYIHPGNKLATIVGFNLADTDYQVAHDVAMQAAAMSPIAVSRDEVPADVVEKELEIAKDKARQEGKKEEMLDKIAQGRLNKFYQEVCLLEQAFVKDPKQTIQQYLHSSNKELTAVACKRITLNEEMSITNFDQLLEAGVHFGHLKRKWNPAMAPYIFMERNGIHIIDLYKTVAKIDEAAAALKSIAKSGKKILFVATKKQAKQVVADKASAVNMPYVIERWPGGMLTNFPTIRKAVKKMSTIDKMEKDGTFDNLSKREKLQISRQRAKLEKTLGSIADLNRLPSALFVVDVLKEHIAVREANRLGIPVFAMVDTNSNPNDVDFVIPANDDASKSIEVVLDAVCGAIAEGLEERKAEKVDAPAEGEDAPVKKERKTRISRKKAEDAEVAEITDEAPAAEVKEVEEMEVVNALGRRKAAVARVFVCEGSGVVTINKRELAVYFPSSILQYIVKQPLEKLGVAEKYDIKVNLNGGGFKGQAEALRLAIARALVKINPEDKPALKSEGFMTRDPRTVERKKPGRPKARKRFQFSKRMDTLSYKTISANKATVKKEWVVVDATDQVLGRMCAKVAKILRGKYKPCYTPHVDCGDNVIIINADKVQLTGKKWTDRVYLNFTGYPGGQRELSPADLMKKGESRLFKRVLKGMLPKNKLGAQLLRNVYIYGGSEHPHAAQTPKTIDINTLKMLPAKEGMATIQIFSNLGNNRTAKVRFLFEKQKISIFLLQIMKRGLLCILFVVLLTVNVSAIVVSESTPVVLINEDFSKFVEGAETAPTEQDLADESTGAIDAQYTQQAGWSGMGIFQAGGICAIAPVYNYYFYEGGYLNTPKGDYSGVITYSFRARLQEGDQSKINVVMGEGYNTIDSYAHTLTTDWQTYTGEFKKGTFDRCFIQFSAGDEDKVLIDDIKIVRIKEIIPTPKSLEATDLTREGFTAHWESSERAKDYLLSVYSKRFPDGKAPKTVKETFDTVNCTDSLISSDNPQYPEGWVVDVVTHGTRHVYTDEGNYSSASVALAFDATGDSIVTPLEDDPMDSFSFWGKTMLSGNSSKIHAEYFNGVEWKDLGYSFASSLQTGRYIDLTSSLPSDCYRVKIWFEQKNNGRVAIDDISYSCMPVRENVYVFEDKNVGSVTSYNVEGLDENLDYYYYVKASSENGVQSEPSDEIAVIGLVAPVVAAATDVTESSYTAHWEKTPKAEGYRVNNYSVYTAREDEEYVVLEEDFSKVTTLATPENPDEFESSSLVILDDYTLLPNWLFSGGLRLANGMLGGYGWQATLQTPELVLNNDTVFEVTVTAWAKVSSGWTDLYIYSENDTKTLTFEKSESKTFTVEMKNGIEKDCLRFATDGGALFFIDNIVVKQKLKAGAQVSRLENSVIVRDSETTSYSFTGLQCGQYKYGYEVSAYRLLGDDLVESEFSDRQIVEYIPSGVNSLSASGAKVYAIDGKLYVQAEVPSKIEIYSISGMSVLEDSVGVGENQYDLLPGFYIVKVGNRTTKVLVKMKRPLRFSMSLSILFLSPMSAIVSAAVDIPLSLSSEKNYIVEVVLPGGSTSANIEDGRITAEGASQALATVVYYDGLGRPEQTSRVGFTATGADLLSTVSYDEAGREYRQGLPTPVSGNNGCYVNPSTYGQTAQSYYGDTYLYRETLYENSPLSRTVGVKNPGAVWNAHPKTAAYRCNTAGEVVLFRISSDGVQRVGRYTPGALYVTRETDEDGIWQESFTDKSGRVVMTRQGNGYDTYYIYDDHGRLCYVLPPMAVDGMYNTGNYPDSHTLLQQYAYLYKYDDRGNCIGKRLPGCKSIQMIYDRANRLVMSQDGNQQSESLWTITKYDALSRVLYTYEANPLRSPGDLRQYCKEKLFVEERADSYTAWPGMGYTLRILLPAANDYRLLTVNYYDDYSFLYIEGTAASQLAYRSKEGYGAAYSSAKGLLTGTQVFDLTDRSKYAITVYYYDEYGNPVQTRTRHVSGDYEMTYAQCDLSGNILKSYTEHLDSRGRLSVSESVENTYDRSGRLTRTDYAVNDSLSTDWIYEYDELGRISSKSIDGGLTHAKYRYNLQGWITRIEDVDFVQNLYYENFMGNYGKVRYNGNISAMNWTYRTDTDTIVNGYRFTYDAYDRLASAYSVTGSDFSSGRYHVEYEYDKHGNMVNLYRNGGRGGMIDEMNWFYEGNRVVEITDMVGEQGRYDMKEYRDYNHNGLDYFYDSNGNMTADLDRDIVAIRYNLLNLPDTVQFRNGSAIVNYYTADGKRTGSKYLMCFIGLSSKIIPEFCLKRVKTVVWSRGMKKRREIFGEMMIDTHTHIYLEEFDEDRVEVVRRAREAGVERVILPNVDFDTVQAMHATNDLFPGYCRMAMGLHPTSVEADYRERLGQVRELLFSGEYCAVGEIGLDLYWDKTYAEEQKEAFVMQTGWAAESGLPVIIHCREAFDEILALLQSGRVPAFRGVFHSFTGSAEQVRLLRGTGDYYFGINGIVTFKNAHLEDMVREVGIGRILLETDAPYLAPVPYRGKRNEPSYLPYMAKRIAEILDITTAEVEEATTANAVRLFGEGMPYRRLPNTDKARLAALEKAVAMEHECDVDKQAASYKTLNEARVLLRRFKSAVEQFQYCYTAQAEANRQYQSHLKTARLYISHFIQVLNLAVLRNEVRKEHKLFYGLDPEDFAVPELTGEKHILVWGERLIEGERERVSHGGAPIYNPTIAKVTVHYDIFKEAYREQQNYKLNTTRSQSGLDALREEADRIILDLWNQVETYYADLPAEIRLNRCRAYGVVYYYRSGEKRPEDDMEKLQRYFDAIEAELSKIEYAAEPDGLYAPVRYELSLGGKRVRPLLTLLACEMFAGDYRRALNAAMGLEVFHNFTLLHDDVMDKADVRRGKPTVHKVWDENTAILSGDAMEIIAFRYIARTEAPHTGAVVELFLKTALEICEGQQYDMEFERRDDVTEAEYIEMIRLKTAVLLGGALKIGAIIGGASETDADCIYRFGESLGLAFQLQDDWLDVYGDPARFGKKIGGDILNNKKAYMLINARQRVEGKDAEELSRWLSAAEYDPSEKIAAVTALYDRVGAGDLCLRQVDEYSRRAIEALRQIGVDEAAKQPLYDLANSLIKRDHMFYIEQSSKLTISIDSSKHNSQYNTNKVPIQTRSATYFIVLFPVNKSSGTILPKAKFNHATFCRPGILAIFETRKQLMTHTFRYITVLLATVTTCFAGRGQEGKSSFDFLNIPTSTHAYTLGGTNISVIDEDINLVNQNPALMGPESDLQLGLNYMKYVGEINLAGATFGKAAGERGAWAAGIQYYGYGKMKSADETGVITGEFSPKDIVFNGIYAHDITTTLRGGVNAKVIYSSYEQYTSWALAVDLGLNYYNADNDLSLSLVARNLGGQIKRYNDTFERMPFDLQIGYTQSLEHAPIRVSVTARNLTRWKLPYPAIESSSYTGSDEIVEKSGFVDNLFRHLIFGVEFLPTDRIYIGVGYNYKTRTDMRTAHRNFLSGFSIGGGIKVRMFGIGVALAQQHTGATTLMVNLSTNLFEFKKMNKPEPRIIIAVDGFSSCGKSTMAKALARNIGYIYIDSGAMYRAVTLYCLDHGLIDGDTVDTDTLRSLMDDIQIDFRPDPETGMTHTFLNGIDVEREIRSMRVSDKVSPVSAIPFVRTAMVAAQQKMGGRKGIVMDGRDIGTTVFPHAELKIFVTASAETRAQRRVDELRAKGIDVDFDEVVANINKRDHIDQTRKESPLRKADDAIELDNSHMTIAEQDAWLMTRYKETVKKLRMARIEIDEHSGFCFGVVTAIRKAEEELDRTGRLYCLGDIVHNSNEVERLKAKGLITIDHEQLKQLHDVKVLLRAHGEPPETYRIAAENNIEIIDATCPVVLQLQRKIKTAYDSNPPGEAQIVIYGKTGHAEVNGLVGQTHGKAVVIEGDKDLDKIDLRKKLLLYSQTTKSVEGFRHIVDEIKQLKPDGQFESFDTICRQVANRIPNIREFARRHDLILFVCGKKSSNGRVLFGECLQVNPQSRLVSDISEIDPTWLEGKESIGICGATSTPRWLMTEVQEYITRLLETTGSTATRMRSEKPTITIIINNLIISPQKWSAICRARDMKLYIISNRLPVKVSEKNGTFSFTRSEGGLATGLDSLQTAYEKHWIGWPGICVDNDSDKQAIGEKLEELNFHPVFLSDTQIKNYYEGYSNSTIWPLCHYFFAYTLYKDTFWQAYREVNKRFCETICRLIGPEDKVWVQDYQLMLLPGMLREAVPDLCIGYFHHIPFPSYELFRILPERAEILKGLLGADFIAFHTHDYMRHFISAVERVLRMNFKLDEIQLGNRVVRIDALPMGINYDLYHNASTQPEVRQAVDRTRKLFGDHKLILSVDRLDYSKGILHRLRGFAAFLEHHPEYHGKVALAMIIVPSRDHVGSYAQLKTKIDEEIGSINGAYSTMDWTPVYYFYHGFSFEELTAMYHMADIALVTPLRDGMNLVAKEYVAAKSENPGVLILSEMAGAAVELTDALLINPNDTGQIERAICQALEMPVEEQLRRLQNMQKIISTQTVDKWAADFTDEWNDICRKNISFRKKQITANAIGTIKQEYNRAKKRLILLDYDGTLAALKPRPEDAEPTPELIETLQKLCEDSDNHIVINSGRDHFTLEKWLGNLPVSIAAEHGAFYRENGLWHKNINKPVWSAGLLSILKLFVAKTPRSRLEVKETAIAWHYRESDAWLGTLRAQQLANELVSICIQQKLQIIQGDKVIEIKSPDYNKGSEVSRQLKKEYYDFILAIGDDTTDEDMFKALPKNAATIKVGYVSETARYNLPSQEQVLPLLQTLVNISGESSTNDKVRKGLNSALHFFKELLNLKMNNLNYGVIGNCRTAALISEKGNIEWLCFPDFDSPSIFAALLDRDKGGCFGFEVSNEYHISQSYVPHTNILSTHFSSDEGEFVVLDFMPCYRSYEKEHYLPAEIYRYIRWIKGTPRFKVNYNPAPDYARGKVIHNITDEYIETYCSSENKDRQYLYSSLSLQDIEQKKEITLQRDEFFLLSYNEKVIPIDIEREKLEYCRTLVYWLNWTNRTKKYSLYNDVIERSLLVLKLMSYYNGAVLAALTTSLPETVGDVRNWDYRFCWLRDASMSIETLFQIGHAGAARRFMKFIQSTFVAKHESFQIMYGIRGERQLKEIILDHLDGYKNSKPVRIGNDAYHQRQNDSFGYLMDLIYQYYRLMPGTLDEIEDMWEMVKSILATVEEEWREPDKGIWEIRGESQHFVSSKVMCWVALDRGTKIANMLKKYKYIERWQKEADKIKTDVMTHGWKEKIHSFSQTYENTALDSSLLLMEPYGFIEANDIRYHQTVKAIKKALLHKGLMYRYNSKDDFGLPSSAFTICTFWLVRALFVIGEKEEARCLFDEILKCSNHLGLFSEDLDFDTKEQLGNFPQAYSHLALVNTAILFAEEDKKLSFIRPMSQIKCVGILTSGGDAPGMNAAIRAVTRAAIYNGFEVKGIYRGYKGLITGEITPFKTQNVSNIIQLGGTILKTARCQEFKTPEGRKVAYDTLVKEGIDALVVIGGDGTLTGARIFATEYNYPIVGLPGTIDNDLYGTDTTIGYDTALNTIMDAVDKIRDTATSHERLFFIEVMGRDAGFLALNGAIATGAEAAIIPEISTEVDQLEELIKNGFRKSKNSSIVLVAESPITGGAMHLAERVQKEYPQYDVRVTILGHIQRGGSPTAHDRILASRMGSAAIDALLEDQRNVMIGIRNNEIEYIPFNKAIKNDKPIDRELLNTLRKLSIMQNLINGRCGWCGTDELYVAYHDNEWGRLVKEDKILFEFLLLESAQAGLSWITILKKREGYRAAFHNFEIATVAQMTEEDVERLMHFDGIIKNRLKIKSAITNARLFIAIQKEFGSFFNYILSFFPDNQPITHTFHSLSEIPSCSPESDAISKDMKKRGFKFFGTTTCYAFLQSTGFVNDHLHDCNYRKMASPTPALHDISPIEFHVPHSGRIKFTKFCKKIHTSGSVGGLMETSDQQYTNEEQLIEDKFQELLNGYLNSNHRKKVEIIERAFKFAKEAHKGIRRRSGEPYILHPIAVARIVSQEIGLGSTSICSALLHDVVEDTEYTVEDIENHFGKKIASIVDGLTKISGGIFGDQASAQAENFRRLLLTMSEDIRVILIKMADRLHNMRTLGSMLPSKQYKIAGETLYIYAPLAHRLGLFAIKTELEDLAFKYEHPEAYNQIKQKIAESEESRQQIYNNFSKPIVAKLKEMGLEFEMKARVKSIYSIWNKMESKHIPFEEVYDLYAVRIIFKCPNEADEKKECWAIYSVITDIYKLHPERTRDWVSRPKANGYKALHLTVMGPDGNWIEVQIRSEKMDEIAERGFAAHWKYKVGNSDEESELDIWLKTIKDILEHPEPNAIDFLDTIKLNLFSTEIFVFTPKGELITLPKDATALDLAFTLHSDLGFHCIAAKVNHRLVPLNQKLHSGDQVEILTSKSQTPKEEWLNFITTAKARSRLTASLRKDRRKIIAKGEKILKEFFESSHIEYNNDVVTKILSNLGIRHRDDLFYKIGNDEITPNENIKKIIKGKSQNPFMRYLKLSFGSNNGKNEQPKPVTPQQLTIDRKQTYILRDENGVKNYKVADCCCPIPGDDVLGYVEDDETVVVHKRECPVAMRLKSSFGPRLVSTQWEASESLSFPAKIEIQGIDRIGILNEITRVISNELIIDMRGLTIKANEGVFTGTVNIMVHDTRVVESLCNKLRKIKGVQKVARCKEMDKNRIQKFLSSTRVLQFVFFVAAVTLVTYFFPREGKFRYTFQEGKPWKYGLLTAPFDFPVYKDEAVIQQERDSIMLDFQPVFSHNESIEKKSVDDFEKALSNYTEMSIPPTLRKNLVQALREAYRKGIVSSEAYTRLQSGKFKEIRILENNVAREMPVSELQSAREAYENMLNKFPDSYSHHILQTCNLNDFLNTNIAFDSITTDRLKDNLLQRIALSDGIVQAGERIVDRGEIITPQTYRILKSLETVTLKKSVGNDHRGYTILGQIIVFTCLFSFFYLFLALFRPQTFNEMRTLGFMMMLIVGISLIAFFLSEFRLQGIYLVPFAIIPIIVVTFFDSRTALYVHLITVLICAFTAPFALEFIFLQLIVGMTAIDSLSDLSRRSQLMRCALLVFLAYCFAYVGYTLLSEGDLSKLNYNMFIYFGVNCVFLLFAYLLIYIFEKAFGFISTVTLVELSDVNNPILRQLSEECPGTFQHSLQISNLAAEAANKIGAKAQLVRTGALYHDIGKLKNPAFFTENQSGFNPHTPLSFEQSAQIVISHVNDGLKMADKLRLPQAIKDFISTHHGHGKAKFFYNSFCNKYPDQPIDESKFTYPGPNPFTKETGILMMADAVEAASRSLKEYTNESISQLVNRIIDSQVADGLLRDTPLSFRDVETIKATFIEKLKTIYHTRISYPELNKNGKAEEKKTDKETTKADNNAPSPTEIKKMKQYEAVIETLDKLGGVATLGDLNSEVFKIQECEWKTKTPFASIRRIVQQTKGIYKIKPGLYGLEKYRKQNEERGIIPETEKNKDSEIQRSFNHAYYQGLLVIIGNLRNLKTFIPNQDKNKKFYDGKTLQELSTLKKLPNYSYPALINRSAMIDTIWFNERNMPHSFFEIEHSTDIQNSLLKFNDLQDFYVRMAIVADAKRKSEFETKLSYHAFDELRLNKRVSFLSYEALVKQYEMEIEKQSLDFILMLTNSFKEFIEKGTSRSTAKLKPLHGAIARDLAEKLGRNYTVFSQGYGIGKETKIRGRYVNKAVDITVKKGERAVAGLAVKFVMQNYSQNSNNYFENMLGETANIRCGNCPYFQIFIILDKLPYYQRSGELSRWETFTAHNAEKYVTLSQDDASIYFHTPNKTLIYVVHIPDNDSLSTSREYMDYYRRLNPSLSLTEHDYNDFGNGVIFNDYELFIEKVYHTIMALMGSLRIKHSGQVFTPDYLVADILDFCGYVESPRILGKHIIDNSCGEGAFLCEIVGRYCRAFRAGNDDIALLKDDLQTYIHGIEIDAGTYERCIENLNLVALKFGVTDVDWDIIEGNALKIKIYDGTMDFVVGNPPYVRVHNLETDYTDVKQFTFANGGMTDLFLVFFELGLRMLSAGGRLCYITPSSWLNSLAGENMRREIVLRKYLTGVVDMGHFQPFKATTYTLISRFEKVEDNDRIDYNVYDERVGKIRHIDTLSYDEIQINRKFYLSGKKELELLKRIRLSASDSYVRVKNGFATLFDDVFIGELPFMEYTIPVLKASTGKWSRAFFPYDEKGSPLAYELLSESESVCRYLEDHAEKLLKGRKRSETPDWFLYGRTQALKDVCILKYAVNTCIKGVESIKLTEVPPGCGLYSGLYILPDKGVTFDMLDRIIRNEEFIRYVSLLKNYKSGGYYTFNSKDLELYINYKIQLEYGKGRDNLSTGQLGLFESAYMAFLLQKIAEEMGIVFHHEEITVEENRQRNEYLRRYYNPETGEGSDTGDRRILRLPDAPIPVQYIPKALFENEIMAQRLVECGSLAGYAERYGHDKRIATDEAGRNPQLADGGDATEELWREWIRVRIRYDFEFWAFSFVRIKDKLGAEDIPFRLNRPQRRILGMLEDMRTAGKPIRLILLKARQWGGSTLVQIYMAWIQLVHCRNWNSVICAHLKESAANIKGMYSKLLANYPDWLLDGEKPKFKPFERMANTSVIAGRECRVTIGSAESQESVRGIDAAMAHLSEVAFWRNSRMKSPEQVMRSICGSIMLLPCSMVVMESTANGTGSYFHQECERAKRGESDKQFAFVPWFEIEMYTLPIDDYDSFIGSLTDYERMLWHRGATLEAIAWYRQKRKEYARHADMMAEYPSDDIEAFCYSGERVFDPTLVEKLRRCCCPPRFEGDIHGKEPTGKQSLQEIELEAKPEGPLKIWEYPAKECEMRDRYLAVVDIGGRSDTSDYSVIAVFDRYWMLDGGPAEVVAQWRGHIDHDLLAWKSAQIAAYYQNALLVIESNTLETEHDDSEHSAYILDTLSRYYNNLYARQSPPDSIGQKPPSRWGFHMNRATKALVIDAQKNALREGSYIEHDTQACYEHDVYERKPNGSYGAMEGHHDDILITRCIGNYICSRELPSASSKGHRSERIVNESSIMKASSFTKVRENGTTCHTLQYCGISLSTKDDRPYILFTSIEFYQTAIEKFMHLENRIKDVRQVTHSVKTGIKLIGFILLLGLNFQGMGQHRSHGEPLRKGRISLKLTVRDSHNRNAVEYATLLLKKGKNRQFSGITDEKGSHTFLSIPKGDYELTVTSLGYKSRTIDLHARRDTTLTILLLSNDIAMQDVVVTAYESRGATSASRIDRKAMEHLQPSSFTDLVELLPGNVSKDPSMGSANLIKLREAGGTGPSDYDVTSFGTSFVIDGVPLNNDANMQYISNSWETGRNTTGKGIDMRSISTDDIAKVEIVRGIPSVEYGDLTSGLVNIERKKGGNDLEARFKADMQSQLFYVGKGIELTDKQFTLNTGIDYLDSKIDPRNNRENFKRVTGSIRTEKRWTNDHWRWTFNSNLNYRGTFENDKNDPDLTPSGAIDSYESSNNALSLAGTLSLNNRKKGFFRSLSLTASASGSWDNIHQEKTVVPSKLSVVPTATQPGVHDAEILPSTYLASLDVNGNPFNAFVKAIATFNYNYRNWFNIIKVGGDWRMNKNYGEGQLYDMRRPISIDITTRPRPFNDIPAEHNLAFFIEEASKLRLGKHRIDITAGLRSASLLNLDNRYVLDGKIYLDPRVNAKWALPRIGERKPLSIELSGGVGWHTKMPDISKLYPDLFYYDLIQLNFFSNENPAVNRMNVHTFIDDLTNYNLKAARNMKWEVRADFSIDDHRLSVTYFREKMTSGFRQGKSYTRYIYNRYSTEGLDPSTMTGPPDLADLTFTPDTILKVQSVHTNGSRILKEGVEFQYSSKRFPIIRTRLTVNGAWFRTTYNNSQPVYKRPSVVIDGRQIRYIGLYNEDDGYIRESFNTNFTFDTDIPRLKLGFSTSIQCMWFTSSQSMWESGVPIAYVNMEGELLPYTDAERNDMILQHLVEPHYENNFKKRTIPIDANINIKVTKKICRDKIALALYVNRLVSYHPDYTLFGNTIRRTSNPYFGMEINFRLMKLKRFFSFLLFAAVITVFTACDEDEDTSVPVDVTLNFTAPSDTITSFTWAEGKATFTDLNRGKEYELDLSQSSVITLSSGLYNITVEGAIASASGEILCNVRSTKDNVQISAPSTSIALDLSIYTPSNSLILKEIYVTGTANDKGTSSLYDKYFVIYNNSSETVYADGVALLESTFGTTEKYQYNDNPQPMTTTFTAAAIYVIPGNGTEHPLAPGEQLVLADQGYDFTQTKADAIDLSIADFEWYDETEKGMDPDIAEVPNLDKWYSYSATIWIPNNQANRAYAIARMGVSKDEFLANYYKEYHYTATNGKEMTKKGYDVPVAWVLDAVNLGNTGFERIATPAVLDRSYATTGIAGTDKTRFGRSFIRKVASSTGSYTVYQDTDDSANDFTFTTPSLKKMKIRFCSFLTIALFLLPALQGAERDSLSLLRTIAEYEALPAKWIETVYTNPATQYYQHCTSLTRISLNGVYGKEDEAALLQAGDGYLKGAADVSSWIKLSDRTRLWGNARYTTGKETGVVWNETADFELLYPYVMADSIGGDLSLQEYAFTGGYSGRAGKFTWGIEGSYRAALEYRNRDPRPKNIVSDLDFAGGGSVRLDKYVVGISVMAQIYSQDNTLDFYAPLGSAYIYTMTGLGTTSVRFGKGDVTDTNYKGYGYGAGIQLLPAQGRKGIYAAANYRKYSVTQHLDGYNNLPLTVLDRTLLDMTAGYSTKQDMHTVGIQVKGALYNRKGTENTFGSAAGNNYDQIGSTTPYTSDQMKIQGELLYGIEAGKSFKGYIRPYYLWFHTDIRQKEKKHRLKTNSSEYGLKIDASGIFEKSLLSLSGNIGIRTGGNGKLSIPNVQKDCVREMLEHNFTMLKTRRTNYGIELKWSRIFSGWALSIAADWQQSHYEKHGSANYAGVNIGFNFMETIIKCSNLTHYYGSRKIYEDLNFEVPKGRILGLLGKNGTGKTTTINILMGYLKPRSGECRIFGEDIQRMQPVTRERIALLIENHVQYTFMNIEQIERFYSAFYPKWNKEAYYELMRKLKVAPKQKISRMSCGQRSQVALGLILAQNADLLVLDDFSIGLDPGYRRLFTEYLREYAKAEEKTIFLTSHIIQDMERLVDDCIIMDYGRILIQKPVKELLDTFTRYTFKTSSPDKLPHDPSLYSTAAIRDSAETYSFENEERIKQILQEQSIPYTDFKSEKMNLEDVFIGLTGKYMNKAIFFKEWIKTRGLFFIALLVSLCFAGYVMMRINRVITFKGADHLWAILLSRDTVFIELLQYLPLIIGALFASLQFIPEMTQKRLKLTLHLPYPQQRMILLMLLAGVAQISIVFLLQAASLWIYLQQHIACEMVARILLTAAPWYICGYTAYLMTAWICLEPTWKLRIVNLLIAAGIVRIFFLLDKPEAYNSFLPTLIIFTIPCASLSIRSVVRFKEGCQDMKKFSKIFFYLTAVVLLSWLLPWLLQFAASKPGNDPFTLYSCVTKRFAYIQSSKDNGVKRYDANGTEYTVAQFDSILPTFYYRQLFSKDRLPDTINGKEVTPKIIAHGNFTFKQSARDVNVTKPALNMIMESMPDRIDLENPIEAFRTTDRITFIDMRDNTVNKKKSALFDKVMKQKGFEFPMRTLSGNPTNRKEYDEGYLMVDNNHRVFHVKQTKGLPYVRETGVAPELGIEHVAITEFSNRKTLGLLTDKDNNLYVLNRDYTLHKLPIDKYDPKTNTLTIMGDIFYWTLKISDERGVTTYAVDADSYAFADSLRYDYPETALDKWSKYIFPFELSFTSYDDQWVKPRVSMGSCWVLILNFVLAALLYFTACKGSTCSRRQKFITTVATMILGIYLFIPLLVCKRAMKKSIFILAAVALLAMVSCNNKAKENQNQESAATVALSVDDILAEGDSLVGKTVTVEGVCTHICKHGGKKLFMMGTDDTKMLRAEACELGSFPAEVVNSLVSVTGTLEEDRIDEATIQRMEEQYKNQSGEKHGDGEAGCESEKKAAGQADINTFEGRIQNFRERLAKAKEAGKDYFVMSYHINTTSYEIKNMSKEKRISGKFRKWCHILHRDLSFFFAGVILIYAFSGIMLNHKRDFNSDYSITQKEYRIAGNFPKAKADFSKAYVLDLLDDLGERNNYTQHYFPKENTMKVFIKGGSSLTVNTETGEAYYESVKKRPILSSLNRLHYNPNRNWTIFSDIFAVSLIVITLTGLVMLKGRKGFWGRGGIEFAAGILIPLAFILLMRIKHVIGIAFTCMVFIFSCQAQSSTESHAGKNKQEQKIKPRHLTKAEFLSKVANYEKTPDKWEYLGSKPCIIDFYATWCGPCRKLAPILEEIAGEYAGKIDVYKIDVDKEPELAAAFGVQSIPTLLFCPMKNQPQIAAGFMDKATLQKAIKEVLLVKMLSSSTPLLRNYCSSVSPLYSALQNTGEKCKIYLSTLKGECFLTPSPIPCGIVGYSHTPPLRTYVRLGEKARRAGRLKQRWSDVLKDFYSPPCRVPMKYYIELFTLLLFVGCIPNRCYTIYQIDNGEDYLQDGMRRIVDRQGRIGYVNEKGAIIIKPQFAFGFPFKDGRAKVTNRGEKKVVPNSKGEYHYWESDKWFYIDKRGVSLPQFSVMEWIPTQVVDDKENRQYRIGFIGLARWFYLPYDNSNDWIIVKIKEAIENISMIEVTLLNTNTIIDVQHSYKERPNSLLINNPSLMTKFAGRNFDNAIILFFPYLYPKNNRMKDFVAIDFETANYEPTSICSVGLVVVRGGEITQSMHRLVCPEPDYYIRRFSEQVHGIYPADTCGAPTFDAVWSEIVPWVEGLPFVAHNKAFDERVLRAACRMYGIDYTYGTFLCTLRQARRVIPRTSIANYRLPTVCAYLGIPFDRHHYALADAEGCARIALRLWGDEEMKIGIIVAMQSELECVRCLLENPREEQHGSSLFIIGTNGKHELILTQSGIGKVSSAIRTYELIDRYAPDCILNTGVAGGIDRSMHVMDIVVGSEIVYHDVWCGEDCAWGQIDGLPARFHSDPALVEKALKVSTDLSLYKGLVCSGDRFITDPAELSQIKGLFPEGMAVDMESGSIAQVCYLRHVPFLSFRIISDTPGVDGHIDQYNNFWENAPHRSFEILTQLINVLMKKIPSFTIDHIHLLRGIYVSRKDYLGDHVVTTFDIRMKEPNREPAIGYGALHTIEHLAATFLRNHPVWGDKIVFWGPMGCCTGNYFLMQGDLESKDIVELMRETFRFIRDFDGEVPGAAPRDCGNYLLHDLPMARWEADKYLREVLDVIEEKNLVYPTIEKMKKIGIFYGSSTGTTESVAHTIAQKLGVASNDVHDASKLTGEMVKEYDVLVLGTSTWGCGELQDDWYDAVKVLKKAGLSSKEVALFGCGDSESYCDTFCDGIGVLYEELKGTGCKFIGNHVPTGDYNFSSSTAVVDGEFAGLPLDEMNESDKTEGRIDNWVKSLKDMITCNAYPAELKVFLNHVYEYKKGVRNMVLYTTNKKYEEFAVSRLNSQNIDYCIQPIGCNKINLFFGRRECIEVIQSMTSRPLNELTPEEDFILGAMLGYDICGQCLRYCKRKAKMFTVLLLLLGASFALRALPLYRCVTPRNAAGHGRGEEQTMNQVSDRLAALAPSQTLAMSQKSSELKAQGVDVINLSVGEPDFNTPQHIKDAAKKAIDDNFSHYSPVPGYMDLRQAICAKLKNENGLDFTPEQIVVSNGAKQSICNTILALVNPGDEVILPAPYWVSYVEMVKLAEGKNVIVETGIEQDFKMTPAQLEAAITPKTKLLILCSPSNPTGSVYSREELEALASVLERHPQVFVISDEIYEHINYVGAHQSLAQFPSIRERIVIINGVSKGYAMTGWRIGFIAAPLWIAKACNKLQGQYTSGASSIAQKAAAAAFAGEQGCVETMRQAFQHRRDLVVRLAKEIPGLKVNDPQGAFYLFPEVSHYLGKSDGERKINTSSDLAMYILEVGHVATVAGDAFGAPDYLRLSYATSEENITEAMRRMKEVLARLKMENIEKETVSSKFMENPYIEMKKKISVNGIVALVIAILAFVGSSAVSDPQSSLKLFLIVLGAGLLIYGLIRVAVGNKIAVCRATGKVLKKYELLFESAEVSRLKQMVESGNFQSIDTLQRAVGHKAGAKLTLFIDADHNFATAQVSEFIPFDYEPVMSPMSYEGEAVKTIATLVTSGTMCVAGKDLHILNSLVFPMHDSLAVWSVRIFVFLSCCNAIEKRMNLEDFLYVCHMKGFMRKIVAFLFAVIFGLTSAIFLSAGADNELVKPQDPSYPYSLIDVRAQSLPMQSFTAIIPVERGLCVNVSRFPSSPITGKVGENIAFLYEQQLYCQLVDLREKIVGDCYDKYKAQLCYDGHYLYSLCKMLIMIMRKKFVCMVTAALAFMASAQPFQSIYYPSKLTASTITRVHQRASVLRSADENIHAIVRLCDEADLDRLAADYGVAFNVVTGNLATAVIPMSALVDFAEDPDVENVDAGNSVKAMTDLAREYSHVDALHVGLPDFPRSFTGKGVLIGVIDTGFDFMHPAFRDAGGNSRIIHVWDQSGRNGNTSSMGYGVVFDTPELIRSAAHDVSRDTHGSHVAAIAASSADVYKGMAPESDIVVVATDKSESGIIDALAYLLDYAEKEKKPMAINLSMGTVIGFKDGTDPIASMIDGLLDESGKKCLMAIAAGNEGHRNSTIVTEVVGQGEVINTSFTPPSHMRENVFIGCSTTSAFQVSLSLVGSDGVAFETSISSDASESVSHENITGEKDYSLVTLSPMKDADGLQRGVSINLYAPLKDGQKWNLSVTGAAGKYIACCDYGELDNGSNASTMAATACGKIPISVGAYVSRDKFTNLQGMERSSDWTVGERYPLSGMGPTFDGRDKPDVLAPGAHIISAINNYAASYNVNREDLAYTEVDALIPGRTNYWGAMCGTSMATPVVTGIMALWLQANPRLDFDHVRKLIGSPGSHIDAKTGMESLLAGVELPKCKNTVPYIYNPFTRSIVIIGEGVVCVEVFAVDGTFLKRKNRPVEPVHIPEGAMRIVRITTSTGSHILKIMKNFYKKLSFVMVMGISFSSYAAWNGDATAWTQGDGSEQNPFLIENEAQLSHLQQTVTAGETYQGKFFRLTADLDMGGKQMPSIGHYNDYTTQENPELVRESKVFRGTFDGDFHTIDNLTIVNNNADVNLGGVGLFAVSYPETHICNLTLGQGVTVEGSEFDNVGGFIGYSSGGKVENCRFMGLVNGGSMNAGGIVGVAEATVTISGCVNTGRLVGHSFAGGIAGTVSISKVQNCYSSATISCPSAYWVAGIVGWAEQSTVYNCYAIGSIEAEVGSSFLPGKSPICAELEKSSASDCYYVEALTGCKPLSEQAGVTAVTEEEMKAADMIAKLNANLSANAWGVGADGFPALLWEIDGTGSIESVGATAGIEIVKEGDRLVIVSATGEKARLSVYDITGKVIVTAVVSDGDCVTVPGKGVCIVALVTDDGNCTTHKFLFMYNICKNIAQQTIRFSTSVLDNINLNINILYSNFMKDFFSILRRFVPPYKYYLALNIFFNILASVLTLFSFALIIPILEILFKLKQASYTFMEWGSGSIKDVVINNFYYYITTIIDEKGAGFALLILGVFLMVMTFFKTAATYLSSYFMIPLRSGIVRDIRNYVYEKVVSLPIGFFTSEKKGDVMARMSGDVGEIENSIMASLDMMFKNPIMIIVCLATMFAISWQLTLFVLILLPTAGYIMGQVGKKLKRRSLEGQNQWGLLMSIIEETLGGLRIVKAFNAEDKMIKWFHDDNNRFYRISNRINRRQSLAHPMSEFLGTCTICIVLWYGGSLILSGTSSIDAASFIYYLVIFYSIINPAKDLSKAAYSIQKGLASMVRVDLILSAVNPIQDPKNPVELKEMKEGIEYRGVSFRYSTENVVKHVDLSIKKGQTVALVGQSGSGKSTMADLLPRFYDVNEGGIYIDGINIKDFRVHDLRGLMGNVNQEAILFNDSFYNNITFGVENATMEQVIEAAKIANAHDFIMATEQGYDTCIGDRGSRLSGGQRQRVSIARAILKNPPILILDEATSALDTESERLVQEALENLMRNRTTLVIAHRLSTIKDADLICVMHEGEIVERGRHDELIKLDRYYKRLVDMQKFMLFVGLVGNFLSSCFCYLCICVIFAAVNCSVLSGLNMMQDFISKESETSVFIEAKAVALIYCLIKKNDIFHLSEMKKQELHYPPPLCFAMQNIGEVSVGRRGWKIPTVEVTESGLLSLCSSQMRMGEAVHTLSIIIPAYNEEKTIAELLQRVLDADLGSGIERELIVVNDCSTDSTEQIVEDFIAHHADAPIVYLKHEKNYGKGMAVRTGIRAVTGDYIVMQDADLELDPNDFKKMLPFLLSGEYHVVYGSRFLAEENSHTYFSYQLGGKFLSVMTNILYRQHITDEPTCYKMFTADLLKSIPLDCEGFEFCPEVTAKVSRLGYKIKEVPIRYYPRSIEEGKKLRLSDGLKAIGTLLKYRFWKIPESMKNSTTSKKNTPSTKKGTATPQKEGISFSWVAKNIFAVVIVLFLLNKFVLDVQPGYNWAYNMLQKNLETIRHYSRTTTDNRFEMKLGLSHVYLRYVKENTPENAVILLPGKEAFYPEGEERIFSGEPYNKLWAIRFLYPRRVIIPSELGKTPWSEKVTHVAIVNGRGYEYLDYEVEQKAPHAVLPMRLKPMLVVSGIILTCLSGLLLTGIIGTRFSWTERIGLSFPLGMTLQTVVMALLDLMHIPLTSFSVLSAGAVTFALLMFFVARYRGFESFRITSAMLDDWKQANLVWVLLIILIGYCEYMNFSKCMFFPPSDRDSLAAFDTLGFVAAQDHTYMRMSLFDADYNPSIHRAGGSIAYAPFVQMSYAYVYILGAETSKSIPALMYLFFVIAFYGILRRNTGKTVAALSTLFMMMAPEMLAFSSLSTTNVMQAIFAGLGIAYTASWLRSRNDDELYAGALLLGANMWCRNEGIVFIGAACAILLIDCIRRKSYRKGLYFTGLSLLPAIIWFIYMKIGGLYTEGMAITRLFWDGEKAGLIVNGFWALFTNPIYYGWTFSVFAIFILGNSWFMIKRKDNLALLGMIVLSIVFYGLVVYHVDYVWDSIQNVLAYSAKRFFFCFVPMCWYFAATTQIARKGSEYIERFLSLKMFEADWSPRYAVNSGLLTKIKGFKMRDRGSIWPEHTYLQMNKRGFIALFLCIFLSAIAQSVAAQFTISGIVKDKNDNLPLPQVSIRLLSAKDSTFVTGISSKDNGTFSLKVPKAGSYIAAFSFLGYRTAYEPVQLSKGQPRRNLGDILLGSNDVLLQEAVVVGKAPEVVVKEDTVEFNADSYKTQPNSVVEDLLKKLPGVEVDSEGKITHAGKEITKILVDGKEFFSDDPKVATKNLPVDIIEKLQVVDRKSDLARLTGVDDGEEETVINLTIKEGMKHGWFGNVTGGYGLDGRYEAGAMLNHFFGDNQVTILAGSNNTNNMGFTDMGGSRFRRFGGMNGINTSHNVGVNFNVGKGDAFRVGGDVSYNNSNRDVLQRTERQNMFEDSTSYYSGYNKMKDNGQNIRGNFRLHWEIDSLNTLEFRPRFSVALSKSDSYDSALTTAGDIARSKVNFSESDNHNKGTGYDLSGELIYNHKFRNRPGRSFSIQAQYSYSDTKEDGWTKALYRYYQLNSDSTLDQMDDNHTWSNGYGARFTWTEPLGDVKKGRFLTFSYRFQASFNNADKYTYDILNDPFAIPYDTVRNDELSNSFRNDYYSHRAQIGFKQVTANYTYDIGVAAVPSSSQSIDLINSERNIPKRTVFNVAPYLRYRYKMGKQRSLRIDYRGYSSQPSMNQLQPVEDRSDPLRIVVGNPELKPAFQNWFRARFNDYDEKTQRAIMAMVNGGFTTNSIISETTYDSQTGGQRTTYRNVNGVWNAAGMLMYSTPFRNKHWQLNSFSRISYSNSVGYNNGVRNNAGSFNAVENLGLAFRSDYFDAELRGNYRYALATNSMQSRNDQSTHNYGGTFNVNGYLPWSITLGTDITYSGSAGYSAGYNTESWLWNAQASYQFLKGKNATIALKVYDILGQRNSIRRTVTGNYIQDVEYNTLDTYGLITFTYRFNTFGDKKPDMDRFDRGPRGYGPPPGHPGRPGGRRWMVKVGDRVRYLNAVGGGIVVRIAKDIAYVDEDGFETPVLARECVVVEPAEPAKKAASVPASKVVTVPSVEKAYAPEEDDEDSFAVEERPEGEKLNIALAYIPDESKHLNTTRFSCYLVNDSNYYLYFSYLSRDDEGWRTRYAGMVEPNIQVMLEEFGQEDVNSLERICIQYIAFKKDKHFSLKSPVAVEYRLDTTKFYKLHTFRESLYFDEPSWTLDIVKNDMPVRPVVFDASDLERAMKMKKSADIPLRKPVVKHAEKTAIVEVDLHASVLLDTTAGLTSSEILDYQLGKVRETLDQYRHAKGRKIVFIHGKGEGVLRNALLKEIRDKYKNCSCQDASFREYGFGATMVTVHMQKTQNIRIEDFNYPLPDERIAKFPLSKRDDSKLLVYRKGEIEEHRFHELPKVLPADSLLVFNNTRVIQARLHFRKETGALIEVFCLEPLEPHEYSLSFQSTGSCSWLCLVGNLKKWKNGVLTQSVNIDGKTVNFRAERGLPHGNAHEVHFSWDDSDVTFATLLDHAGELPIPPYLNRETEESDKTTYQTVYSKIEGSVAAPTAGLHFTPEVLNKLKEKNIPTLELTLHVGAGTFKPVKSETLEGHEMHTEYISVSRNLIDELSRTDRRVIAVGTTSVRTLESLYYIGKMLEHNPNILPDSLSVGQWQPYDGSEEIDSRQSLRNIVEYLDRRNMDRLVTATQIIIAPGYRYHIVQGMITNFHQPQSTLLLLVSAFVNGRWREIYDYALSHDFRFLSYGDSSLLLPMKIKTVLWGLATAALLVSCSGAKLSVANEQYARGEFYDAAQTYRKVYSKTNPRKERKLRGEIAFKMAECYRRINMAPRSSAAYQNAIRYDYPDSMALFYLARSQQYEGKYKEAIKNYQAYLETNPQSSLAKNGIRGCNLAQQWKKTPTRYIVKKATMFNSRRSDFAPMFLGEDFDQVYFSSSTEKALGKNKSGITGTKNCDLFFSKKNERGAWQKPEPIEGDVNTEDDEGVISFSPDGTTMYLTKARREPNADTSVEIYTSTRTGAQWSAPQKYEITADTLSAFGHPAVSPDGEFLYFVSDMPGGYGGKDIWRISLTEKEGTLENLGVQINTPGNEMFPYIRSNGDLYFSSDGHPGMGGLDIFKARMNDSGLWQIENMKAPINSQADDFGITFGEEESGFFSSNRGDGRGYDNIYSFELPSISVWISGTVIDKDDEPVPDAIIRIVGNDGSNQKEFARKDGSFRFKLDRGVHYVMLASCRGYLNSKQEFISDNEEADAEYGVNFVLASISKPILIENIFYDFDRATLRPESETSLNELVKMLNDNPNVSIELGAHTDLKGSEQYNLRLSDRRARSVVDYLIKSGINPDRLQPKGYGESRPKVITKKLATQYPQFKEGDVLDEKYINGLSPEDQEIANQINRRTEFQVLSITWNLYMFFQPLAEETGMYLSTSTFIAKIHVYPTDFSAELKEDCEIKKLFMNGLLGVPLCFVGFPLYSPLQKRNLSKVILPLYEFAILVIQQEKMLKLISWNVNGLRACYDKGFTDIFRQLDADFFCLQETKMQAGQLDLQFDGYQSYWNYAEKKGYSGTAVFTRLQPISVSYGMDRTEHDREGRIITLEMEDFFLVNVYTPNSQEGLKRLEYRMTWEDDFLHFLKQLETQKPVIVCGDLNVAHQEIDLKNPKTNRKNAGFTDEERYKFTQLLSAGFTDTFRYFYPDQKDIYSWWSYRFKAREKNAGWRIDYFLASASLNEKLCSAKIHTEIFGSDHCPVELEVDLMKLRFIISLLALTLSFSQLSAQRKNKAYLDYIEKYSSLAVKHQKQYGIPASITLAQGLLESGAGRSELARMSNNHFGIKCHSDWKGKRVYYDDDKKDDCFRKYNKPEDSFEDHARFLKRARYASLFELKVTDYRGWAKGLKRCGYATDKSYANKLIQTIELYELYKYDRRSFKPIRAKDLLPVIVANPHPVYRSWGLLYVEARDGDSLESIAKEFGFSVKKLAKYNEVPKDYPLEAGDIVYLEKKKKKAEKGYDFCIVRSGDSMHTIAQRYGIRLKNLYKMNKLPDDYTPSVGDTLRLRMENRNITTKIIVCSYDELNEKEKKLIDAAKEATNRSYSPYSRFQVGAAALLSGGTVITGSNQENAAYPSGICAERTTLFYANSQYPNLPVEALAIAAQTSGDFIDHPTAPCGACRQVILETEERYNQPMRIYLYGKKEIYIVESIRSLLPLCFGKSDLPEMYISKYRGQLGMKNRFVHFILPSSFPIFVEYIRYGSAMDNYIVSARKYRPSTFRSVVGQKALTQTLKNAIDSNKLAHAYLFCGPRGVGKTSCARIFAKTINCFHPTESGEACNECESCRAFNEQRSYNIIELDAASNNSVDDIRTLIDQVRIPPQIGKYKVFIIDEVHMLSAAAFNAFLKTLEEPPHHAIFILATTEKHKILPTILSRCQVYDFQRITTTDIAEHLQYVASQEGITAEPEALNIIAQKADGGMRDALSVFDQVVSFSGGHITYKSVIENLNVLDYEYYFRLVDAFLQNNVPQALMIFKEIRDNGFEAQFFIGGLSRHFRDLLVSKDPVTLPLLEVSESVAKRYGEQAEKCTLPFLYRAMELSNRCDLDYRISNNKQFLVELTLIQICQITNPVTSAPENPPLQKITPAPNAGQTVSPTTQTPNTTASQQTAGTTSGVTQTAEPQAAYRAATIRPTTFKRDIPAAPTQTRKAAPPTRISIHQKPAESVAEENTSTVQTVLDTPFTAEALTTAWLEYAKTIPTEVVLVNTMQSCRPQLVDPKNFVVSVDSQIQVDHINEHFHELMSFLQNALKNNQFSMQLRINQPGEKEIIFSPKDVLMKMIEKNPDIKNLYDTFDLEIAMENITIFDDIIRVNISFVILGTSPKEYYSMEILDKTDLQILRVLQNNSRLTTKELAAKVNLSPTPVFERVKRLEANGYIKKYVAVLDPAKLNRGFVVFCSVKLRRLNRDIAAEFTRIVREIPEVTECYNISGDYDYLLKIHAPDMKYYQEFIINVLGTIESMGSLMSTFVMDEVKHEYGIPLMAQKKLHFETLQLHVGQEQPDPTTDARAVPIYQTTSYVFHNSAHAAARFELKDAGNIYGRLTNPTQNVLEERLAALEGGVAALAVASGAAAVTYAFQNITCAGDHIVAAKTIYGGTYNLLDHTLPAYGVTATFVDPADLSNFEKAIRPNTKAVFIETLGNPNSNIIDIDAVAKIAHRHNIPLIIDNTFGTPYLIRPIEHGADIVVHSATKFIGGHGTSLGGIIVDSGKFDWTASGKFPQLSEPDPSYHGIRFTQAAGAAAYVTRIRAVILRDTGAAISPFNAFLLLQGLETLSLRVERHVENALKVVDFLSRHPKVKRVNHPALPDHPDHALYERYFPQGAGSIFTFEIKGGTEEAHRFIDNLKIFSLLANVADVKSLVIHPASTTHSQLTDQEKEEQEIFPGTVRLSIGTEHIDDLIDDLKQALEKVMCFQKLKAIFLSPFVWDRIFLLFHKDNIFIACVMLLVKKMTKKLIIAIVAGIVFPLYAIAGQPSAQITHGPYLQNLSEDEVTVVWTTDKPCKSWVEFSKKEAGKSFYSQSPRKAYASQDGLYCVDTLHRVTVKGLEKNTTYFYRVLSQEVKELRAYRPVMGSVVSTDIWKKPLTFTTLDNHRETLSMVMVNDIHGNNELQKKLLGMAPPQDFDMVLFCGDMCSHINRQSDIFTSFLNTSIELFAAQKPFVYARGNHETRGAYARNFSRYFAGSNGKFYYAFTYGPVRFIVLDCGEDKPDTDVEYSGLIDFDSYMLEQKDWLSREIDNPEFKNASYRVVISHIPFTKGGWYGSERLREQLLPLLEQAQIDLMLSGHEHAFGFSDKGNAASFPIIVNSNNSVLTLFASNHSLKVQVKQEDGKILLEKEFQKQMQFYSTNRKTSPVSLREAVVRGLAADRGLFMPEVIRRFPPAFYQNMKEMTLREISFVVAEAFFGEDVEAGKLKEIVDETLNFDIPLVQVADNRYSLELFHGPTLAFKDVGARFMARLLAYFNKQEGERQVNVLVATSGDTGSAVANGFLDVPGVKVFVLYPQGKVSEIQEKQFTTLGRNITALEVSGTFDDCQALVKNAFMDKELNEKLYLTSANSINVARFLPQSFYYFYAYAQLCGLVGKPEEVVFSVPSGNFGNITAGLMAKRMGLPVKRFIAANNRNDVFLQYLHTGVYTPRPSVATIANAMDVGDPSNFARILDLYGGSHDAICAEVSGVSYTDEQIRRTMSETFRNERYLLDPHGACGYQALVDGLQPGETGICLETAHPAKFLETVESAIGETISVPEKLQVFMRGEKQSILMPVGFNAFKHFLLNQQMKYIIVLGDGMADEPIGKLGGRTPLQSADTPAMDWLAAHGRCGLLKTVPDGYHPGSEIANLSVLGYDLDRVFEGRGSLEAASMGVDIESGEMAMRCNLVCIENGRIKNHSAGHISTAEAAELIDFLQEELGGEDANFFRGVSYRHLLKLKGGDKRVDCTPPHDVPGTLFREVMVRSLVPEAVPTADRLNELILRSQQILPSHPVNRKRVAEGKDPANSIWPWSPGYKPRMETLAERYGIKSGVVISAVDLIRGIGVYAGLRPVEVEGATGLYDTNYEGKVQAAIEALHTHDFVYLHIEASDEAGHEGDVDLKVRTVEYLDHRVLKPLIDAVSRMSDSVTIALLPDHPTPCRLRTHTAEPVPFVIYKSGVEPDGVTRYSESDVAGGAYGVLVGEQFIKEFFRKNMEISNELNVGSREQLRAWLSENHDSCDEVWIVCCRSGRVHTCGLPYLDVVYEALCFGWIDSTCKRVGDKMLQRLTPRKKGSNWTELNKARFRYLEREGTMTDAGRAVFPYLLETEFTIDDIIVEELRKHPVAMDNFSRFPELYKRVKIGNIQMKRNNSDLYWRRLDKFIRFTCRNKMYGEWNDNGRLSQIYENKMKVLKFGGTSVGSVESMSSVKHIVESCREPVIVVVSALGGITDKLIGTAKIAVEGGNAYEHGFREIVDRHIAMIHGAVDSHKRDELLSLVEPLLDELGNIFKGVSLIKDLSVKTLDTIVSYGERLSSLIVSRVIDGAEHYDSRRFIKTQMQCGKHIVDFEETNRLVKAGFNPLPRIAVVPGFIASDKSNGDVTNLGRGGSDYTAAILATALDASQLEIWTDVDGFMTADPRVINTAYVIERLSFVEAMELCNFGAKVIYPPTIYPVFHKNIPIFIKNTFNPSAPGTLISEDNSHTEGKAIKGISSINDTCLITLSGMGMVGVIGINSRIFNRLAKSGISVFLVSQASSENNTTFAVRNADAELAVKVLREEFRHDMAVGEISAIEAEKDLATVAIVGENMKHTPGIAGKLFNVLGRNGINVIACAQGASETNISFVIALGSLRKALNVIHDSFFLSESQVLNLFVVGVGTVGKDLLQQISKQQQRLLETKALQLRLVGIANSRKCLFDREGIDVEHCQELLDRSEMVALPEKIKDEIIKMNIFNSVFVDCTASPDIAALYKTLLDHNVSVVASNKIAASGSYDSYRELKLTARKRDVKYLFETNVGAGLPIINTINNLINSGDKILKIEAVVSGTLNYIFNVVGADVPLSRAVRMAQEAGYSEPDPRIDLCGQDVIRKLVILAREAGYRVEQSDVKKKLFIPDNYFKGSLADFWKAIPQYDAEFEQYRRQVADRGKVLRFVATLDHGDVEVGLREIDSAHPFFHLEGSNNVILLTTERYREYPMVIKGYGAGAEVTAAGVFADIIGIANIRMIYKNIISFTILYFTDVFKRHFENIFLPHGKGDSRMIFSPANDYFCTTKQKNVAYPTQPNPIRFSPYSLLFVKKMPENITSVLIIYTGGTIGMVENSKTGSLEPFNFHHLLDKVPELRQLGFSISTVQFEPPIDSSEIEPDSWVKLVHIIADNYDLFDGFVVLHGTDTMAYTASALSFMLENLNKPVILTGSQLPIGMLRTDGKENLITAIEIAAAKNTNGEPLVPEVCIFFGNHLLRGNRTTKISAESFSAFVSTNYPPLAQAGVHIHYDENQIARTTSKPLRPHYLMNTNIVVLKLFPGISEQTVRSILNIPGLKGVVLETFGSGNAPVKEWFLYLLKEAVDKGIVIVNVSQCMGGSVQMSRYGTGCKLEDVGVVSGYDSTTEAVLTKLMFLFGHRYSAKVVKENMNRSLSGEITLTLHNMKKQIKEIPSILFLMISFGIAIRVMTGGKEEVPLHWNVRGEIDSWGDTWTIVLLPVIALALYGLLTLLQRWPQWCNYPCKITDKAGAYKLMSGMIGHIKNLVMLLFLYITLSVAQIIELSTCVLLLIALAIPFIIIVMSKKFERFSMDKRYARSWWAVVLFLVVFLSTSAIRRCGKNTYRYDEGLIFGTFYHITYKYPESLSEEIKNRLLQFDASLSPFNDTSIISRINRNEPVETDRWFEHVFNASQRIYTRTGGTFDPTVSPLVNAWGFGFKKGVIPDSVQVDSLLRQVGMNKLALENHRVLKSDTCITLNFSAIAKGYACDVIGQLLFDKGIDDFMVEIGGEVFARGKNPEGKMWRVGVNRPTIADGEAGTIEEIVQITDAGLATSGNYRNYRMVDGKRIAHTIDPVTGYPVQHTLLSATVMAPDCMTADAYATAFMVMGLERSKALVDSLPGVEALFLYQNGSDTTRIDYWATPGMREKIERMSLFELFVLAVGLCMDSFAVSLTSGVLLKPFTLSRVLKIAAFMAVFQGAMPLIGWFLGIGFKNYIEAYDHWVAFGVLLFLGMKMIYEGWPRKGESEPCCIDPADTRTLVGLSLATSIDALAVGISFAFLNMTMITPTIVIAGVTFAFSLVGVYIGRQFGRRIHNFAEVVGGVILIGIGVKILLEHLFFMSFNHKSRYNLRDYVFFNGLFAKMKYNNSIIGIVFPDNYFNSILERIIEMAKITVQNTDISVVKYNEEDYISLTDMAKSQLQEHIIFRWLSLKSTIEYLGEWEMLYNPDFNCTEFGTIKNAAGSNNFVLSVKTWIERTNAIGIRSKAGRYGGTYAHRDIAYHFGMWISPKFQLLLVKEYQRLKAEEHQQLGWSAKRELSKINYRIHTDAIKQNLIPQEVTPVQANIIYANEADVLNVAMFGMTAKQWREANPELTGNIRDYATINELICLSNMENLNAVFIEQGMPQSKRLVRLNQIAIHQMSILESGNNYNRKLLKMKGDKNYDYTDEFSDIIHTERFISAAELSELFFSAPKWITLLMKFRNVVMRPFGLKKERKLSDLVLIESENMATVCKNDKHLDLEIVFMTESMERDNQRISVSTKVRFHNNLGKCYFAIIKPFHILICTTLLQRAKNNIEKSLYRMKSSFIKLSVWIGLSALVACNDVDTPKYNLQAAPELAPLAQPALVLNEASSGFIAETFSWSSGDYGFPAAPVYTLEIDNRKDFPDPIQLAESNADYVSVTVARLNMATLILDGQPGEPCDLFVRVVAKLTADHTVASSPRDITVTAYDEPIVYPKLYVPGNYQNWDIAAAPVLQSYRMNNRYEGYVDFVVAGNPDAAVEFKITTLPDWAQGDQYGDGGPGRLKLDGENISYTPQGYYLMQVDLDKLTYKLTPSEPVPMKSFIYKCFIGGSVALSMTLSSCLGDLDLKPIDDNVIQLSDFKDNPQYYTQLLAKVYAGLAVSGQEGPAGNPDIQGFDEGQAQYLRAYWNLQELPTDEAVLGWNDAGLPELSMSTWSAANGFVYVMYSRVFFQIALCNDFLRNTTPTALAANDVPEDVAAQIQTYRAEARVLRALSYWHAIDLFGAVSFVTEENKIMEAPKQKSRAEIYQFILDELNAVEESIPLQPQYGRVGRDAVNMIRAKLYLNAAVYTGTPQYGLCAAECEKIIARHNTGTNHGLAETYKYLFGGDNDRYARGGNESEILMTVPFDSDSIRSYGGTMYLTVGSYGGKISARNYGVNDAWAGPRSTSTLVLSFSPQDERYAFFSEGASINNTNLSTYQDGYSVVKFTNLLSTDWDNAAGRAESYPDTDFPLFRLADVYLMYAECAYRGAADRETGRTYMNYLRDRAGMPQYDSVDDITLDEILQERMRELYWEGHRRTDLIRFEKFTSGNYLWPWKGGVYAGKSLDTKYNLYPIPAKEIAANPGIQQNYGYMKIRSGLLLGLCCLSWSLSAQRMAVQGTVVDSSGEPVIGANVIVRGSSAGVATDLDGRFRLDVVPDATLVVSYLGYNTQEVPVNNRSQITIVLQENAVALQEVVAIGYGTVRKSDATGSVTLVKPDEINAGLATSAQDLLVGKTPGVVVTLNGGKPEGGADIRIRGGSSLNATNDPLIVIDGVPVDNSGVTGMSNSLSMISPDNIESFTILKDASATAIYGSRASNGVIIITTKRGRSGKPQINFTANMYVNTPRNKVGVLDGDQFRQVITDYYGEGSPAYNLLGTANTNWQDEILRTSVSSDYNLSVGGTYKILPYRVAVSYTNQNGILKTSAMDRVTASITLNPKFFDNTLSVTANVKGFYMHNRFADEGAIGGAVSFDPSQSVRVDNLPIGNGYFTWLKPGTDEFIGIAPVNPVSLIDERSMKADVYRSVGNLQLDYVMPFLPALHANLNLGYDVSHSIQHNLMTPDSPLTYKENKKTGLGQDERLRQLKRNLLLDFYLNYKQDFESIHSRLDAMAGYSWQRFYKDGGTRTTLMPDKEQWFVSSYTDHLQLISFFGRVNYTYKDTYLFTVTLRGDATSRFSKDNRWGAFPAVALGWKIINEPFMERATSFMSELKLRLGYGITGQQDISDSYFPYMPLFTIGYPTASYPFGDQYYYTIRPNGYDPNIKWEETTTWNAGIDFGFLNNRITGSLDYYYRETNDLISRIPVPAGSNLTNEIYTNVGRLRNEGIEFNIQAKVIDNKDFTWDLGMNVAWNSNKITKLNKSESADYYIPVGGIGGGTGNTVQAHKVGYPAYSYLLYEQVYDADGNPIEGLYADRNGDGVIDESDKYIHHSRDPKVVIGINSTMNWKNFDFGISLRANLGNYVYDNVLSQNSIYSAMYNSAGFLSNIMRRGAKFETQQYMSDYYLKNAGFLRCDNISLGYTWKHLLDDALRLRVYGAVQNPFVITKYKGLDPEVFSGIDNNVYPRPTTYTLGVVLTYMRKKFAWFFCIFMSSLVLLSCSEDNKKGEEPGDGTGGGTPEGDTKTYFETTYSDLSAYVDKNVSEIWAAVGNASKDEENNILYVQDQKGNRYKATFKLDGTMIATIEMVLTGSSENKGIEVWESMISSFRDYKLGTFLGTKFKDYATGEGGIKQTTEETIPLLTLEANTLIYPVFGIQKKVYCCPIMDKDKFRVEMCRNYLPLDFSTLGKYVGANIDETLQEFYAISNKILFGTAMAYLYFDSAIDLKGNNYTVNFDSDKTLETVLEISAYIPENEQTIDRWKDLLQNYADYNLGTLKELYVTDAFGDKVQDLADAQAAFDLYESNGRNNGIIARFETAYGNNSLILNKDYCYILVRKSMKNFYLILSCCALFSLTAHSENFSGDDFNGAWESDGGNQKVQPVGWHALYSNISGFTSMKAGTVSKSGDDTNAYPTIENTFAGSIMWGTKTGYVIPGILSLGTPWIYVNTNYFTAATGDLGVDGGVEFTGRPSKITFKAQYYNAPTSDIDDAAHIKVYLWKGSAESTDKNGANHTDEMSAVLAGNAGAALIGSGELTIDNDIDAFETKEISIDYTSQEIPEKMNIVFCASNYLSKKPEKPLEVAEGNYLQIDDVAVVYNSTGIENTQNEELELTVTRQGFSINDTSVQPVTIHETDGRLINQGLVNNGRYDFPFTPGKIYIVKVGNAAFKVCALMNRIYIYVMLFSGILFLNSMTCFAANEKLSASSRQTLDQLIRSGNRLEKLSRQDKDLRLLVQCDEHTTENDLLECFVLSYVALGNGFYTICISPSELSRFLDSDFVKRAELPRKASLSLDEARTETNVVLVQNGESLSSPYTGKNVVLGFVDSGFDVTHPAFRSSDNETLRIARFWNQIDNKLLSDKENILAEGTDNEEQTHGTHVAGIAGGSYFGTIATSESTTLDKNPYYGVAYDADLVMVGSTLEDTDILNGIKYVFNYADSIDKPAVVNISLNTSYGPHDGTSLFDQAIDAMLGKGKILVGSIGNDAKNKTHASMELNNAETPVLTFFKPSGYAANTFEVWGESDGFTVTVSLTDSQGETVWSCTSNGTDQSFSVPADFNYSEGGEIAYYTELWNNTRRMYRVALNNLNLKGYDIQIGVTGETQHIDLWTDKNSGQFTDNGKSTHVNFDADRTLGELGGTGKRTISVGNYTTRNVWTNFSGKKQSMLIDYPLNKINYTSSRGPASDGRVKPDVTAPGGMIFSAVSSYSDYYKESSANTVARATINGKSYYWGQMTGTSQASPFVAGVIATWLEANPELSPEDIQLILKKTARQDSHTGACPNSIYGYGKIDALAGIKEVLSPSAIDNLSTDKLYKLYRDGILFTSQAGKINLILSTPDGIIRYSDKTDVEPGTRIEWRELGLNTGLYILHINGFSEKIFVPMKKIILLLSAVLLWALPVSVSAQNKNNDKAKQQRKEQFDRFCKFRRDFMMKQIGLSEQEAKQFFPLYEEMEGKKWTVDREARTFARKIVRSETAVSDVEYEKAAEVLLEKDEKLAKIDREYYDKFKTFLSNEKLFKFKNAQMKFPRAMMKWHGGKHHHEMEKKTPLLDEIGRKHGMKVPGNYFADFTEKMTESLPEREFPELVQPSLWLRVRPWIYMAAMFAGIWLMMKMFTGIFSVEKGETPDMEMTASATDGSTIEDEWIAYYVDDYTAYEMLYTDSDYMQDYNEDIVIEQLQNPATVRQAFARVVARYSEPLYWQIRKMVLSHDDANDLLQNTFLKAWGSIEYFRGDAKLSTWLYRIAVNEALTFLARERERRNLTADDTDDFLLSHVESDEYFDGDRAQRLLQEAVLQLPEKQRLVFNMRYFDEMKYEDISEILGTSVGALKASYHHAAKKIEEYLQDHVMFPKNHEGNGQFPDKRIVRFSFTVLYNLENMEINSILLAFLLTMIAGLSTGVGSLIAFFAKRTNTKFLSAALGFSAGVMIYISFMELMPEALGMLSESFSPRMSNIYMLIAFFSGTSFIALIDFLIPEDENPHEVHRVEELSGQQRLHRTGILMALAISIHNFPEGLATFASALGNIDIAIPIVIAIAIHNIPEGIAVSVPIYQATGSHKKAFWYSLLSGMAEPVGALIGFLFLLPFWTPTIHALLLAFVSGIMVFISFDELLPGAEKYGHHHYGIGGVITGMAVMAASLLFFIMKNFLLAFILGTLPFLATGKPIPAITDSLGNRIYNLNAITIISNPKWDSKLFEFPGSISYLNTGNLDEMNIRSVKDISTVVPNLFIPDYGSKLISSAYIRGIGSRINSPAVGLYVNNVPYLDKSAFDFDFIDIASIEVLKGPQGTLYGRNTMAGLVNIKTLSPLEKQGSKIKLSFGNYNLWGVAATTSQKLTDDFAFSINARYRQDDGYFKNEYTRQNSGSTRSGGGRVQLDWRVNRHWKLSFSGDYEGSDQQGYPYAGYDKTLKKTGSISYNDEASYRRDIFTSGLSAQYLHDRFIFTSTTGYQFLDDDMHLDQDFTPRAIFTLQQKQKMHAVSQEFAVKSHKGKRWEWVGGLFGFYQQTHTDGPVDFRQDGIDLLITKQTNDQLAALKQNPALAGMPDITIDIDNRNLYIDGIYKTPAYGAAAFGQATLNRIFIDGLSATIGLRIDYEHTRIYHHTHATEDLTGHANVTINMGNRPPMSIQQPFILPLGIDGKESMNTIELSPKFEVKYAIGNKSFVYALATRGYRSGGYNFQMFSNLIQSQIRSSMMSELMKNMGGGGNGGRPAPSRSAVGMPAFENTTDVNQAISYKPEHSWNYEIGGRSQLIDHRLFADLSLFYIDCHDQQIAAVSGYGRVTKNSGRTASYGLEASLRATPTNRLLLSATYGYTHATFQEYNDGKNDYKNNFVPFAPAHTLALSGAYTLPLDKETDLTFDLQYLGRGKIYWTEANDAAQNFYGLVNASIILSGKYADLKLWGKNLLNQHYQAFYFETMNAENLSMPNSFVQCGRPITFGADITIKFMKKKMFYALSALLLCSACTTTPRNPFEEPARPAGQESVLKLACEPLDTVRVGFIGLGSRGKGAIERYVYLPDAKVVALCDLDSANVNKANEILTSHKLPVADIYVGEDVWKEMCGRDDIDLVYICTDWHSHAPMAVYAMKQGKHVAVEVPAAMTVAECWDLVNTAEQTRRHCMMLENCCYDFFEMATLNMAQQGLFGDVMHAEGAYIHDLRSYNYDTTATGYKNMWRLKAQKEEAGNPYPTHGLGPVAQILNIHRGDRMATLVSMSNAQKGMHLYAAEHGIAGEDTARIDMGDMNTTLIRTAKGKTIMIQHDVTSPRPYNRIHMVSGTKGFAQKYPLTGIALEPNAHEFVSQQTLDSLLKVYEHPFCKEIGEKARKVGGHGGMDFIMDYRLIHCLKNGLPLDMDVYDAAEWSCLVELTDYSVRNGSVPVQIPDFTRGEWDKLQGLTFAEMQFPHDFFFVPYLYRKNVIPFRSFDFWTEDIMYREYIFRKQAPMRRQVLLLLFSLFAIVGFAQQRTVTGTVVSAEDGLPVIGASVHVKGTSQGATTDLDGKYSIKVNENASLTFSYVGMQPKTVQVGNQSVINVTLTSSSTQLDEVVVTAMGIREEKKKLNFAVQSLNADEVTAGQSANFVNSLQGKIAGVQVSGSGGSPNSSSQIIIRAISSINLGQNNEPLFIIDGMPMRGGGSSAGDINPNDIENMTVLKGAAASALYGSEAANGVILITTKSGKTGQIVVNGSASVQIDNSVRIPKIQQKYAPGNLGFYKENSVTGGWGPLLKEGEKTYDNVGNFLGTGLYQKYDVNASGGTDKFTAYASFNYTSTDGVVPEDYKNRMGALLKATFTPSKWVKINASLNYIDTKSRSFGNEMSTIYTWPINNDMRVYKTPLGKPVYSIEDGGRYDNWNALTDANKIAAGVSPYWGRYEDGGETQSSRTILNGSIEWTPIKDLTFTGKIAYDKGYTTSDAYAKPRFDKDELDESVISKYLYKFGSYKFEPSRSELLTVQGLATYKVDLFKDFSMNLLAGAEIMINKSYEATMAGQEFVLEGDYYSFNNTNTENWLKTGDYPISYFRSKKNKYGYFGELRFDYKGIAQLSGTARYDGSSTLKQAEKSSYFYPSVTAGLIFSELFHISNDWFSYGKIRGNWAQVGKDATPNKFTKAYREASTFPDGGYSVDPTASYAITLEPEMTKSWEIGADLRFFDSRTRLDVAYYSTTVNNQIVTVRVSPSSGTILQVRNEGSIENHGVEATLSQDILRSKDFEWTANLNFGLNRGVVKSLPEDVSEVQGTQFSDIYTTAYLNGSTTGISGKDYMRAPDGQILIDEDGYPIINPAKSVYIGNREPDFLMGLSSTFRWKDLTVSFLLDGRVGGDVYNGTARSLFTNGMHKSLENYRNREVVVKGVVAQPDGTYVQNNKPIILNQTNLNTYFYGVSSNFIEDGSYLRLSYVTVGYDFTRFLKKGNPYIKGLRASITGRNLFLLTKYSGSDPQISTSAAYGTGTMGIDNMSIPATRSFNFTINATFMNKYKVIILSLLISFMGASCEDWLYDNVNEDAAHEVLPQQVLPVVLFYSAQLQFDHAEYGAYLTQTLTTGGRNQTSSFAYKSGWGDFLTMNRHPQWRRHFYDIGVNAKEIIDEAHEAQAWNLELIGRTLRLMSTQMTTDLFGDMPRSEAYESNSPHYDTQESIYEWMNQEIEELIGMYEDPTYTEAATNIPIDQSIDRVFAGDLNKWKHYTYALKARLLLRKLPNWENNAATCQAIITAVNRALEGWEDVLYRFDGGNGAQNSPWGEAFGSTEQGGLGWEGRGNMLNSAVPTKYFMENILGVFESHNNLKGWAEDPRILAFMSARPGPSGTSDSGTEMRYLDTNIGMDVSYKVDNYPTLFPEVDGKKVSVYTQNTGYVPLFLEEELLLIKAEATYWSGDKPTARSLTMQAAEINFDRFNLSSIYGSSYTRYRNNYLGNETGTGNYVTTYFPADGFNIGHIMRQKYVCLYLQPEQWTDMRRYNYSCEENGIQYDNTYVYPGLKRPNNIYEAHWGDDPKAWINRINYDPETEEKYNKAELERLGAYKNYQWLRKPMIWQMKNKVKIASLLLAIAGLSGCEINDPVNDWADLGQQTAYVYWELKDAVNAGSDLDFRVYYYADGSTIEKAQVWYGVSSTINRAVTCPYISYTYTESETDEVVASHLVKEFDPQTVSWDDAKSSYILDATFPVSSSWASVTWASVGSSDFTETLFKTYYPGDYETNFREALTTQIETDYHGNMKKIVVDGFMKMTEEEYEALFTKTTNEEVYEITDENKARLDGIVAALTTPELIFDGKEYGVNYNCTYTLSAKFQVSDSNGVISNTDIKNITVNMKALRNISLTVVLLASLSACVENDPTYNVYPSDDVAFTYHITNEGYELDYLVGSTIQFTNTSAISGSCTWDFGDGETSTDVNPTHTYSLPGQYEVKLTVGDDYTTRPLLINDIKPTIVAKTEDDRICVINDVEVTLEVTLRNPAASEEPEYTWVLPEGTTLLDHPEITGNTYTGENPGRLVFKNIGSQTITLKTTLGGRALQDVKANVQVGTPNTSKTLYYAVKSGNVMAYKLDYNVPEGSNNSPFDLGVKAGAHPLNMLFHNEVLFVLDCGTQFSYVNDEDGTRGDGKITAVAKDGSSMETVLSNVGNAAFNDPFYGWIDNEQIYFADRNTGIRRIGVNERNLALSTSDAKYDYFVQNNRLEYYGNPWQYGAMNACFAKADGLWYWGKTYGGGGIFRFAESDISPVDISRGTNPPYPTIFPDEFVKSFVIDATNQILYAVIRDKGLYAVPLTDITANDATKTNTKAESKYLVASFKSDSEGSVGEYVDVCQMVLDSSDGSVYFGLRAEEGSSETSGIKRWNPTTKKLETIVSGVNVYGIALNNELSNLFMKYIAKIAIVLFTFWLAIPTIAQTPKKEVRAFWLSTVWRLTWPKTTVISNTGNAQEIQEQKDELIMLLDSVKAANANTVYFQVRGRCDAMYKSSYEPWSSDLVATRGMDPGYDPLLFAVEEAHKRGIEIHAWFNPYRYESVLHQWDGTPQNYRESHPEWLLDYSDGSILNPAMPEVRDHITAIIQEVVQNYDIDGVVFDDYFYMSGTTDDMDDELYQQSNPDNLSRADWRRQNVNKLIAQVYRMIQSEKPYVRFGISPAGVWCTDATIAERYGVTPTPVGSDWAYDDIFCDPMAWIQEHSIDYISPQIYWTIGSSSDYTLIAEWWSQIVRQFGCHFYSSHSASDLSSAKMPSKYGKTTTGTLSFDLNGEKVSSKALSPIERKTAEENEYIVDGATASFKGSELVNQIKVNRTYDETGAPGSVFYNMRKVTHTSGMLSLLRSDVYKYPALIPAISWKATSDPGLVSNIAFTNGQLSWTGAEGMRYAVYAVPENAAQTTACRDARYLLGLSYSTDYSIPTIYRTGYTYAVSIVDRYGNEYAPLFMGATAGTNEAVTLNTPVNNGTAIGNYEFTWSSVADASYYIDIARDDLFTDLILSRETTGTSFPSSYLPDLEKGTYYWRIRTRKANCSDGISAVYAFQSGPFEIESPTKGATEVSVTPSITWTEYPNATEYRLEINKYDDFRSMGKVLDQRYNENSITLPEGVLVGNTKYYARVTAYAGSTESISKTTNFTTESKEPSIPVILYPTQGATVEATSLQVRWAEEPFASTFRIELHTNDQFTPIRNVKRQTVNAFTYETEFDNLTDGTWYLRARSEYIGGETEYCDTISFTFKNSSGMETLEKRGKCYVIQGENPALVVGNDARHITVDVANLSGQIIGRFADMENPAAGDRIELSGLVRGVYAVIVHIDGKREILKLIYMKRLLLGMVAACMATSMVAQDPATYEKAGEYTLENLWMKAATTGNNMGVADQLGGANDSRGMTVKGDEMLFAYRAAFTGIKIYDLKTGDKKRDVQFDAEKFKITYTYTKIDTIVNAPGDTTFQQTPMEEQKTPGFLCNDIQVDDAGNVVVFNMSTALNGEAIGVWKIDMTSGEPTKVMELANKDGLLDGYRVDYFAVKGDVTKDAILMFPVSSGKYVIRCDIKDGQLAGQTGDYEGYNFKVIEIKSYYPAEAVDNGTGPRVSIIDNDYFYLDGFNSAASLYDMSGSLIESVGDAPEECAIKNVGNNGISEFTLNDKPFCAYVISNTATTPAQAWNIIEMGEGPTFAGATYYWTFPQGGMGDISNPVRTALPRIAKVADKNGKEAAYIAVYASGSGAAVYKMTPDGYDNDSESGIANVATDNVKIFVSGDAIYFSGMANAVVYNFAGQKVMEAAGVQSMAAPAAKGIYIVKAVIDGVEKVQKVVVKMDWFRNVLIDIDRMNFSFFFKSYPRISRLSEFHLLLRYDRQIEYFLNFYIGKGKGKGDIMKKIFTLFAIFACLPILLSAKGPAVIGGSTYTADTLSHYKVGPGTYYTAIHFYGPKDMRAFYLEIDATNPYLSFQSVLGRDSLVTCEGITNMAARKSKEGSRYFAGTNADFFATSGAIGTPVHGCAVEGQLAKVPVSSGPQTSFTTNDECFISFVTYAGELTHNETTYTIHNVNGSRSTDQLVLYNRYVGNYTHTNAYGYEIPVSLADGEKWGLNKTVKLKVAGTGSAAGNMAIAENGAVLSGHGTSADFLQTLQPGDELEIKIMLQLEDGSYPDINCMVGGDRKILENGEVLETDWAELHPRTAIGYSADRSKVYMLVVDGRQGGYSDGATTKQMADMMKFAGAANAMNLDGGGSSGMYIEKYGQVNSPSDGHERAVSNGIFVVSNAPDDNTVAEILCTSAYYSLPKNGIFTPHFMGYNQYGYLIDTDLQGVTLRCDESLGYIKGTDTFVASGDGKGKLYATYNGIETSIDIVINEPQGLTLRLDSVINDGLYEYPIEVTAIVNGESMLISPDAFSWTVQDPTICAVTEGLLKGIANGKTDIYCRQDDFTDTLSVTVQIPDRRNRAIDDFSDASSWDITNSALKDISIVPTAQGTELRYTFSSGRAPYLQIAKDIYLYSLPDSMRITLNTGATQVSKIALSMKNNASSTSTLTEFENIPQNTDHVISIPMNGYFENYRDMSLYPVKFQSLKLFILGSSQTAGNQYTIALKEFSLIYDGITVNVSNPEIASLLRVYPNPVEAGESQIHFVLPQNADVNCELYNLGGQLLNRVEMGQTPAGEITLPIGNLASGTYLLKIYRNGIADSVKIIVKMKKIFSFLLSGVLSLFIYASGITIGGKTYAVDTIVHSHDIGPGTKYAFYDIPAYPLKFHVMEVDLTNPYVDIETCLSGDKAVATETPSSMSARNNRPGHEVLGATNGDFYQFQDPIEIGIPRSGQYRRGECVTNPVGRASFVLTPDRVPYIDRVNFAGTVRSGDNSHRLHAVNMQRLEWETETAPNFMLLYTNAYGTETHATTGGTKVMLHAKEGELFFGANKNIVCVVDSVFANPGISPIPEQRAVLYGVGTAETFLKSLSAGDELTVFLGTDLASTPGLLTDFKEQMGGSDHIILKNGVPADVWDEEHPRTCMGISQDKTKVYLMVVDGRRAGYSAGATLSVLGDLFLAIGAYDAVNLDGGGSSAMVINQQIVNRPSDNKERAVGNGVLVISKAPIDDVTARLEFEPIHYILPSYCRFIPQVTAYNQYGLIVNPDFKDYTLSCSPEIGYIDESNAFVAYGNPGHGTITATYNGISVTKDVTIQETDFAMRLDSVILDGYEEYPIEISATIDDKEFVLNPSTPQWEVADPEICGISNGVLSGLKNGVTTVTGKLDDFTGSLKVKVEIPQTHIQQADQFTSGWELTSISAINDVALTPHANGETNLEYTYKSGRQPYIQMAKTFSFYSIPDTFRITLNTGDTKCSKITMSMKGGLMSTSQIMEWPAVNPNEDFTYEVAMNDFLDDKEDLGNYPVQFQYLKFFLDASSQTAGQKYKIRIKNFDLVYDKVTLSVPNIALASALRVFPNPVKAGETDVYLQIEEPAEISVQMYDLNGKLLVSKNYGKCESGIIAIPISSLQPGNYLLNINKDGKSDVAKLIIKMKKELFVFALSALCGLSAEATINIAGVEKQVDTLECRTVGPGVQYVRMHMPEYPLDVYTMTIDLNNPYNDVDAFIGKNHAGSTEAMTSAYTRLSTPEHQSIGSINGNFWIVSGQNMDDRLLGQPHSGCIVNGEIATEPNGWNRAGRGDEIEKLQEIGFVVLDQDKKMWIDDMNFEAKVINAANESFAIAEVNRIRNENEIVLYNHFTGQTTSDIDGTDVLIKPVEGASWGLNKDVECVVTRIVQSKGGTELEEGEYALSGNGTGAEFLNQMNVGDKVKINTKLTTRTDNLIPIAEQMLTGNALVMREGKLTPRNENEAYNSQTYSRSGIGMSQDGKTLYLIVIDYKSSTSVGTNTATMCYILKQAGAWNVANMDAGGSAQMMLRGKLVNNPADGKERPVSNGFMIFTNAPEDNTLNSLAFDNYNLEVPSYSCFEPTILGYNSYGVLIDTDVQEFTLSCDASLGTISSDGKKFYASPNATSGYLHVTSGTATGKIKVTVKEADIVMKNSEIIADKAHPYSLEVISHIGENTFTYDPSSLSWSIEDPTVCKIENGILTGIKNGTTNITGSIGNFSGNMKVTVEIPESPKIPADDFYGWTTKSISSITDAAVTPSGNNQAILGFTYKTGRLPYVEMDKAITLYSIPDTLRMLINSEIPVSKIQIACKANGDKEQYLEYEGITVNEDYLISIPLSDITGENNRGGFPVSLNYIKFYINTTGTNSGQAYKIHIKEFSLVYNGIESGIDETVAGNKNMVVYPNPITGNTLFLQGENIVPGSSIRIYDRVGALILEQLLDETGIVNIGDQQPGVYIVNVQNELGTHVCKIVIQMRVNLTIILLACIASLSGQNVKVTKHYEITPSVGQSAFYPILSPDGNRIVYTSENFSGLKSYDFASGKTQIITTAEGAGFDPIFSTDGSTVYYRPQSIINGRVHRSLKEYNLIEKAEKQLIAPTRDLKRPVAISGGMEVVADNKLMKSTGSQISGNYVYSIIKEGKIIVCDGKSTRILRPYGDKVESYLWTAVSPDGSKIVTYAIGVGTVVLDMQGNILAELGDYESPTWYGNDFVAAMKATDDGHQFTSSKIVLLDCNSKQVHDLTSPSEMGMNPSASAEAGRIVYSTVEGKLFMLELNVTKMKKYYIIIIAFLGCLGLQAKDMTGLKIYINPGHGGYDSDDRNVAVYPYAQGDTLGFWESSSNLHKGLMLRELLQEQGATVAMSRVLNRTEDDRGLETIGREASEWEADLFFSIHSNATGTSRRDNFPMMLFRGYTENPVKPEDKVAAKILFKHLIENQVTYWTQTEEYVVGDFDFYPDWNNAGLGVLRKLTVTGFLSEGSYHDYVPETYRLLNMDYKWMEAWHFTKAVMEYFDTEGFTTGNIAGVIYDSRMTRTESYVQHGRDKQVPLCGATVTLLPNNITYTTDNLYNGVYMFKNLAPGNYQLKIAAEDHYDRTIDVTVTANTISYTNVAMDRVRNTAPEVTSYSPVMENETDSINCTTPIVLNFNWDMDTESVQKAFSIDPPVEGNITFEDSQYRMVFTPTRPYEVATLYTVKLDKSAKHPGNMSMAEDFSFTFLTQGRNQLKLLAASPSEGAVLHYPKPTIEVRFDNVLDPVNIRDLIKLQDSEGNDVSINLRSAKYNQLGDSYGNYYFTTAADLKQGQNYKLKIDASLHDVENIAIVDPIEINFTAGDVSRSETAVEEFETPDMITFDATQSIGTTTAKAIRSTAQKLFGSASYNFTYTFNADEAHVVFTTDDTFGSSTVVDNTQTIGMHIYGDLSCDEIWLQLSSGNDTQEILLTNVDFRGWQFRETRLDQLNPGKDYRISGIKITRTKPFFSESGSFFLDNMLVYTSSDIHFIATSKAINVYPNPASDILKIQSDTSVQRWTLYSLSGSCIATGSETTIDTSNIPSGTYLLKIQTEGKEFCYPVLIVHMIDVLSGIIQLFIKIKQTAVMKINFRIGECRLSFMRIVPFESRNNVSIDFTEAQPISASYAKIKYLSSFSKMKVIAESGSTTTEWVLVDGKNVLERSFTEGINPFFQTRREISHSIRLNLPETFFKKRWERVYFYGAGCANLDKKNILEASLVAQFKTPISAESDLLAAARGLLIDKPGIACILGTGSNSCLYDGERIIKNVRSAGYILGDEGSGAAMGRRFLSDYLKNLTPKDLCDAFHEKFKVTPDEIMDSIYNHPFPNRSLSTFSYFLKDHLDNKYAFNLVYEELMRFFQRNIIQYDYKSYPVYFMGNLAYTYADILDLVAKDFGLNIEKTEKSPMQGLIEYHSIYGMKENRYILSFIIFLLGSLSIHSQTHSDLRTTVEEALVSLKPEHLAIGEIKLDTLLLEKGNKLVVQMNDEFSYLPFRKELVKRAYDTIRSILPPDLKKKKLFILTDGYEISELIPFADNRKRFEIHCERPIVSPIKCHYLPTKGLLNRHIALWQSHGYYFEQSLNRWEWQRARIFETVEDLYTQSFVMPFLTPMLQNAGAYVFSPRERDTNRHELIADNDNADTYFETGTEKVKWENGGTGFAHTVSVYTGTRNPFDDGSFRQTKTTTDPRKEIQAHWYAPIPQTGKYAVYIAYRTVKNSTDDALYTVYHKGGKTQFKVNQSMGGGTWIYLGHFDFAKGENAHVELSNLSRKNGKTVTADAVKIGGGYGNIARRVDNSHIDENPGNSSINYSYATSGYPRFTEAARYWLQWAGFPEKVYSPSQGKNDYTDDYKCRGEWVNYLAGGSDILPDSSGLNVPLDLAFAFHSDAGTTKNDSIIGSLGIYFTGKGRKTYGKNTPRQVSRYLTDVVLTQIADDIRETYEPEWNRRGMWNKSYFEARVPEIPTMLLELLSHQNFADMRYGLDPRFRFLVSRAIYKGILKFIAKQNDYEYQVQPLPVNHLRTEFIGTHEIKLTWRAVEDPLEPTATPEKYIVYTRIGNGAFDSGTLVSDTSYTKGIIPDSIYSFKVTAVNSGGESFPSETVSLCRCSQEKGTVMVINGFDRISAPDSFEIDTLMAGFDTRKDFGVPYLYDISFIGEQYEFRRNIPWIDDDAPGFGASRADYETRVIAGNTFDYPYIHGRAITNAGYSFLSASDEAVTDQLVALNDYRIVDLILGKEKQVKIGRGVTDRAFKTFPESLQTIIADYCENGGNIFVSGAYVATDLWDNGDVNETDKRFANEILHYTWRTGQASVSGQVKPAASPFPAFDTLHVEYHNTLNENCYAVESPDGIEPFGKGSYTIQRYGENNIGAGIFYRGQRYNTCILGYPFETIKTEKQRNELMNAILSSFDQTITHQMKRIYLSLSLLLLVIIGSRAANFKFAFLTDIHITAGDSIPYNDLARSVNQINDTPGIEFVIVSGDITNIGDRKSMEVVKSLLDRLNVEYHIIPGNHETKWSESGVTDFARVFGSERFKFEHDGILFMGVNSGPIIRMADGHVAPQDIDWIKTELDKAGKEKPVIFITHYPLQPGDVDNWYDVTDAIRPYNIRLVMGGHYHKYMQLEYDGIPGILCRSNLRAKEKTGGYSLCEVTPDSIFIYEHKIGNVPTRKGAYSMTGMNYPKSNAGYPRPDYSVNKEFPQVSEQWLVRSGYEIFSSPAYWDKKVYVGDDSGAVSCYSATDGRKLWSFKSDMRIIGTPAADKNVVVFGSADMNIYGLNASDGRLLWKINTEAPVLGAVTIRNGIAYIGGSDHKFRAIDIKSGTVVWSYDGVEGYIETKPLVYDNLVIFGAWDKNLYALDKKTGKEVWKWHEGKPGRFYSAAAVWPVAANGKVFIADPERALTAIDASTGKTVWRTKESMVRETVGLSEDKRRIYSKTMNDSVVCYSATTDFPEKIWASNVGFGYEHAPSMPVEKEGVVFGSTKNGLMFGLDAHTGKVLWKHKVGNSLISTLVPLSKNKCLFTATGGEIGLLVIDYKINKHKMKTINCFIPFSGKVQVTETIKGLRNCEYVKNIYLLSSEKSKEQIEGCEILDIPSLNASTTMKLLAAYSDADFTLLYTKHTTLELGYFALERMVHIAEDSQAGMVYADSYHVIDGEQKKAPVIDYQFGSLRDDFNFGSLLLFNAEALKDAVARMKTDFQFAGLYDLRLKLSQKTSLVHINEYLYSEVENDTRKSGEKIFDYVNPKNRGVQIEMEAACTEHLKEIGGYLEPVFEKIEFNADNFEYEASVIIPVRNRVRTIADAIDSVLKQKTNFKFNLIIIDNHSTDGTSEAIDRFAGDERVIHLIPERNDLGIGGCWNMGVHHSKCGKFAVQLDSDDVYNNENTLQTMIDAFYAQNCGMVVGTYMMTDFNMNMIAPGIIDHKEWTPENGRNNALRINGLGAPRAFYTPLLRQVKVPNTSYGEDYALGLNISRHYQIGRVYEVVYLCRRWDDNSDASLSIEKMNANNLYKDRIRTWELQARIAMNKKMKVTSEQAKQLLTDQLSVWESARDNYKALEAVQVKELTVEGCTVKIQFNPARIVSSAAKVDTQSLKERKCFLCAENRPEVQEGLPDGSYTWLINPFPIFPEHFTIPVNEHLPQLIEKRFGDMLRLAHAAEHYVLFYNGPKCGASAPDHAHFQAGNKGFLPLEKELKKYRRIPIRTEKSARLSQVEDYICPFFLIEAESEETAEKLFVKLYNALELKEGEPEPMMNILTWYEDGKWSSCIFPRAQHRPSCYFAEGDENILLSPASVDMGGVFITPLEKDFRKIDAEHLEKILSEVCLDREKMYEIIEKLKMKEPQVTVGIMSERQIRFVFNGTYLANGVPVSGEHEAHTDGKQIFWNGNRYTRIVFTPEKEDYSFCLKEVTIGVKFHWERKEDQTFKGNLNLIVENGLITAINALSVEDYLLSVISSEMSATASLELLKSHAVISRSWLLAQIRKNKELAGKKPDSLIRTDKELIHWYDREDHINFDVCADDHCQRYQGITRACTEVVAQAIQATHGEVLTYDDEICDARFSKCCGGVVEEFSSCWENINPPYLTALRDDKNEKDFPDLKNEDTARQWIYTSPTAFCNTTDKKILSQVLNNYDQETTDFYRWSVVYSQSELAHLIHEKSGIDFGEIIDLKPIERGTSGRLVRLQIQGSKQTLIIGKELEIRRVLSPSHLYSSAFVVEREDIQNGIPQRFVIHGAGWGHGVGLCQIGAAVMGEQGYPYREILLHYFVGANIEKLYMNPQKKTSPWAWIPTLYFAQGLPYVAVMTISVIMYKRLGISNTDIALYTSWLYLPWVIKPFWSPFIDLLKTKRWWVVTMQMLVGAGLAGIAFTIPAPHFFQITLAIFWLVAFSSATHDIAADGFYMLALDTHDQAMYVGIRSTFYRVATIAGQGLLVILAGLLESNTGLTPLNLEIKAGPEYANEIVLPSTDYIIDANNEEMHFVASPSTLEIGTTADPHAVDSINAWVKCQNIANGFVLAEAKNPSQTKDENSSGIGEKINTFIKETFGEKRERTEHKLTGNMGVIKVCLSQKPEKEEKVVLNTVHKSGDQSIYLTQGDRLEFTEENWDKPAYIAVQIDPKLKEASNASFESTSGNISLAWSITFFVLAGFFIAICLYHKYILPKPKSDKAVCEATASNIFKEFFATFVTFFQKKQVWVAVLFMLLYRLPEAQLVKLINPFLLDPKELGGLGLTTGQVGLVYGTIGILGLTIGGIIGGIVAAKGGLKKWLWPMAWSISLTCATFVYLSYYQPDSLFVINLCVFIEQFGYGFGFTAYMLYLIYFSDGEHKTAHYAICTAFMALGMMLPGMAAGWLQELIGYKHFFYWVMICCAATIAVCAFIKIDPNYGKKETEEKETETKMKLKKYIILCLITSLTGGLSAQKTMTGIEVLKKDNFKILEGKRVGLITNPTGVDNSLKSTIDILFEAPNVNLVALYGPEHGVRGDVHAGDKVENSTDPSTGLPVYSLYGKTRKPTPEMLQGIDVLVYDIQDIGCRSFTYISTMGVAMEAAAENGIEFIVLDRPNPIGGEKVEGNLVEDGYISFVSQFKIPYIYGLTCGELARMLVGEHMLAKDCKLTVVPMKHWKRSMDYTKTGLQWIPSSPHIPHPHSAYFYPLSGIVGELPYLSIGVGYTIPFQMFAAEWIDADKLADRMNNLNLPGIKFRPMHLKPFYAFGKGEHLQGVQVHILDYKKARLSEVQFYIMQELAALYPDKPAFCKENESRFDMFDKVCGSNQIRERFSKNYHFDDIKDYWYKDVEDFKKLSRKYYLYKMKEQKYNAYLKEIGKFIPKDRIYTDELRLLAWGTDAGFYRLIPKIVIRAKDENEVSRLLALADKYTLPVTFRAAGTSLSGQSISDSILIVAGKNWEKYSISEDFERITLQPGIIGARVNEILKPHGRKFAPDPASVKSAMVGGIVMNNASGMNCGTHANSDKELLSAKIVLADGTRLNTGDPESRTTFERKHTPFLNKIIEIRDEIRNDNELSDRIRKKYSIKNVTGLNLLPFVIYDDPFDIIAHLMVGSEGTLAFLSEVTMKTEHDYPYSASAMLYFSNIKDACRAVVAMKPGPVFSAELLDKKSLASVNDTTGTGLTAVLTETKADTPEELQANIEEIKKILSPFETVTPIHFTDKPEEYSKYWAIRSGIFPSVGGTRRPGTTVLIEDVAFPLKELPEATADLQELLVTNEYHDACIYGHALEGNFHFIISQSFDSPEQVARYEKLMDEVKTLVVDKYDGSLKAEHGTGRNMAPFVKYEWGERAYGFMKAVKELFDPKGLLNPGVIFNEDPHCHLKHFKPMPLTNAHVDKCIECGFCEVNCLTCGFSLSSRQRIVIQREISRLKKLSDTESSERLKTLQKQYKYLGNATCAGDGLCSMSCPMGINVGDLTHDIRQANLPEKSIGYKTGDFVANHFAETKSALRPVLYLANMAHNMLGDKVMSSIGQGLHQIGVPLWTPSMPKPYYPHRIQQHEESLKVVYFPSCINQTMGTAKDSPDQTPLIDKTVALLQKAGYEVIFPENMKNLCCGTIWESKGMMDIADRKSAELEAALYKASNGGKYPVLCDQSPCLHRMREVMTQVKLYEPVEFIYTFLKDKLVFSPIDEPIAVHITCSMRKMNLGNMLVDLARLCSTKVIVPEEVGCCGFAGDRGFTYPEVNAYALRKLKPQIEKAGVKTGYSNSRTCEIGLTTNAGIPYISIVYLVDKCTTSKNKCHEQPAMNNPPNKRLLSLDILRGITIAGMIMVNNPGSWGHIYAPLGHAEWIGLTPTDLVFPFFMFIMGISTYMSLRKFDFRLSGAVAWKIIRRTIVIFAIGLAIAWFGLTMRTYHQLGGESLSFFERLGRSMWNFDHIRILGVMPRLAICYGAAAFIALIVKHKYIPHIVSVTLIAYFVILITGKGFEFSEDNIISVVDRAILGSNHMYHDNGLALDPEGLLSTIPSICHVLVGIFCGGLIMRTKDNAVRMQNLFIAGTILTFAGLLLEYGCPISKKIWSPTFVLTTCGLAASSLALLIWIIDIKGYKKWSRFFEAFGINPLFMYVLGAVLSILIGSIYVTYGGASMTLKGMIYNEWLVPLFKDETFASLIFALLFIGVNWIIGYVLYKKKIYIKIMIIIADSGSTKTDWCVVNHGKQVKRITTEGTNPFFQTEEEISQVVKDKLMPHLDGVKIDAVYFYGAGCAFPEKNEIVHNAIYRHIPVTIEVGSDLLAAARSLCGHKAGIACIMGTGSNSCYYDGKEIVNNISPLGYILGDEGSGAVLGKLLVGDCLKNQLTPELKEKFFNRFNLTPKEILDNVYKKPFPNRFLASVSPFLIENIEEPCIHRIVLNGFKNFFTRNVMQYDYKNVKVHFIGSIAYYYKEVLEEAALALQIELGTIIKSPMEGLVEFHSTLMAFVKITEQPSLYDNLEKKSVLEILQDINTEDQKVALAVKKAIPQIEKLVSQIVPRMKQGGRIFYMGAGTSGRLGVLDASEIPPTFGMPPTLVIGLIAGGDTALRNPVENAEDDMNRGWEELKEHNINEKDTVIGIAASGTTPYVIGALHAAREHGILTGSISSNPDSPISKEADVAIEMIVGPEYVTGSSRMKSGTGQKMILNMITTSVMIQLGRVKGNRMVNMQLSNQKLVDRGTRMVSEELGMDYDQAKRLLLLHGSVKKAVDAYHAENSNSMKPFFILLGLSICVMSLSAQEAYQYNQFYYQRSTLFEKLPIDSDDIVFLGNSITNGCEWHELFNNPNIKNRGISSDVSMGVYDRLDPIIKGKPAKIFLMIGINDIAHHLSTDSIVKNITQIIRKIKKETPSTQLYIQSLLPTNDSFERFKTIVGKTPQIIEINQQLEELAPIEKYTYIDLFPHLTTPGTTVLDPQYTNDGLHLLGDGYLVWKDVLLPYLQMQSYPVADVETDFVPILLSVSIFKITSVFLHLREWKCMMWYYGKETQKKRYYNLFHGKLNLFNKFSYKATCFNHVNQEIFLNLYSKKQYIMSWFIEMKVTIEDDMKTAVAEGNLVISCTKGDIVLPVIDIKNWTFSTSAGSDDVWTGIESPTASGTNCILNSDRIILSNLPEGSTVSLCSIDGRIVKSSRAEGDYELSISELPKGIYVLTYNKNTLKIAVAKMKKILLLTAAVLISGSAMAQHEHFHVFRNDKQFNTFNNVQEITYQGSPSSGYDKMQVTDAKGNTTTIDIEAIDSVVVRSTGIPEFHVNLTDHPDWTELTGSKSDEHPAILRMDGNGMYDDLPEQEVIFRGRGNSTWNMKKKPYRFKMDKKTAVCGMKKAKSFALIANYIDCSLMRNTVALWLANYLEMPFANHCVPVKVYFNGICKGQYMLTEKTGIGSGSVDIDEEKGMLFEIDSNYDEDYKFAYDLYSHTAVQNGYNNTRTLPVMISDPDLTEIAPALGLSADEYFDTWKNDFSAMLTAVMTTPSTGSLKEYIDIESVVNFFMVNSLSSNHEMRHPKSFKLYKDSLDGVYKFGPVWDFDWAFTFDGREGAPANTPMVDNNGDCGGYTFIKALLSNEEIRTLYQQKWNAFVKDGYPELKAYMEEYATLIEPSAKENGVLWPADYSVDWRLSESSFDFRENFDKLKAWIQQRINYCNEDPNFGLYRMKKFLLLSLFLSALYVRAAVVPVSGTETIADAVSSAVVGDIIELSEAVTYVGNVTIDKSLTLRAAEGLESAPIIQGKLSIKDGATIRGIVFDGASEVADAIRIDDTVTGAPVVISGCTVRNYTNRFVYVSLSGKIESLTIDDCIFIGADNSTTNKAIYASSAHTQVETLSVTNSTFLNFNTGSNYFFRINCGEELVLMPVVLIDHCTFYNCYDRRGVYLYNAGRSTIKNCISAFSERRDDTKSFTAYGDESIVKNVISYNVDLYGSAPKENIISKNPLFVDAENGNFQLYKDSPAVGAGDDGSDLGDPRWGVSTENAPVGELPYECFKKPYSMSPTTHSVRILWQTLDSNPSGTVYYGKTPDLGQKVTAETGWNVDGEGFVHVIELTGLEPFTEYYYQVGDESRRYETICTAKTAPEKGTDFRLVAFSDVHDNDEKIWQNSAPIMLGVDPDMWITIGDLVNKGDMRTWNSAFFIPGESMLTAKTLTSVIGNHETMDKSDENGPTTYYDYFSVPSHGYIDTDERIDPRGESYFAMDYGDVKIIGCNWNEGKDDPSFATGSKQLTWLDEQLTNADSKWIFIFAHVNVYSTSYHGQWSASQKEYIAPLLEKHALAGKHILVFGGDEHNFEHLYKAGVHYLRPGAMNGSNRDQYNMVDKPYSLMFNKIAGFSTIDVSESGEKVKLIARDRDGNEFYSYEFTRSGGLKPSLYITEPNGNNDPVTDSFKIKWSCFDPQGTAKINLYYSLDSINGTSIVTGLSSDVQAIDSYDWNVRNLQPKGDYWIYGTIDDGVNTPVRAYAKGKVSVLWDTTPPPAPSEFTGNFVDGRITLSWKNPVYEIPVNITVDDFENGITSVEGVGDSGGRGSLEEADGYEGKALQMTYDIDKAWGEYAAVLAFEKARDFSDSPYLEFWYKGDGSSRTLRLIVKEDNDLDGNADDWWYNETLPLNSTEWKKAKIDIRTFQAFDWHPNTSKKCDALRVISLDFVVPSSAPCSGGVLALDDIAMTGLINPAPDFEATTIVRRNDRFAADETDGEVVYDGEGECYTDSELEKATYYYAAFSHDDLKNYSAFTEAATWKYTVTTGVDGNKRVDFTVAPNPVREYVTVTFPGDSVSELSVINSQGEIVMREKLKESVTSLPVEGLSPGIYLVSVKSSGQIYNRKIVVEMMKKIIHLFFPVIMLSLFSCHDTEAKHEMEEPDFDGFVKISLQSQITGVQPMTGIVLWADNAKRNTDAISLEYSYMQYKDIVKGKGVYDWTPLEQILDAVASRKHQAIIRFWYTYPGYESAVPQYIRELPDYEETVALSEGKRTGFPDWRHPELQRFHKEFYQKFAERYDNDPRLAFLQTGFGLWAEYHIYDGPRIMGQTFPSKEFQAEFFRFMSETFKSTPWSVSIDAASSEYTPLEADASLRNLKFGVFDDSFMHETHDEYNGKNWKILGEKRYQTSPAGGEFGYYTKYDQEHVLDYPDGIHGRNFEGESKRFHITYMIGNNQPSYQTMNRIKQASMLCGYRYEITDVRVKEDSTCVQIKNAGVAPIYYDAYVAVNGVRSEYSLKDLQPGQSRWVGIPAGSTDMEITIECDRLVSGQKIEFDADVKGEMKKTMKYFMFLLVSTMVVFTSCKDDDEPNGGGGTAGNSAISELAVTPNADVKYGDEVTLTAKFADEKGLRQYMISVSNANGAFYETTKMLTGKTYDMNEKIALPLPKNAVAGDLTISVTVKNSSNELSTEEVGIKGVTLPTFDALYLALDNNLVYTMEKDGNVFSVEDFIPAGATGKIYANSNKTGMSWGMEGDEIIALGKDNIVFGGEEEAYFKISFNAVSFELTLGNAQNWSPISESLYIFGTISGHWDDNDAPDNGIWVERSKTKMQGYQNGNRKYWAWTPPSDGTGSVETDMWGAIVAGQFYFKEGGKDNFLTFANRQLTLGAEDKAASFSITLGGAFSMKVFKEGEEYTKVELSDGTRTLAYTNEGIYINGALAPSAISFCGSSLALIDGEYFSYEGLAQLTKDQTVTAEGVDLSMAYCDHDVFTGAGNPTWKMIAPTGEYLIRLDAFSGTVYVMNNVGYPDVIYMDGWCWNRFMGIERGSWNEKTRLTLYRTSPTANTYQAIATILPWGGDVSFWAAPYTAEEYGKYCISAKYFDGVTPAGDSGLLLPVPTEETYYKIVVDLKDGFTIDKENLDGNYYTIVPANSKKFTVTFTPTTLMNMIFKLFSAGALMFLGVACTSCEKENENNKESDIPMEQVSYKASNEIIVNPERGFYKATSCEMGISGALSVSTLKNYRANGYSLIFRYFYLKNFRDKALTDEALQFFDKDMAAMREAGVKCVLRFAYTSLETEPDAPLSIIQTHIDQLKPYLAKNADVIAVWQAGFIGSWGEWYYTTNNLNTPSARKAVLDKLLEALPEERVVQVRTPQYKQEYLRLNGKPTTALTAANAYTNGIAARIGHHNDCFMASETDYGTYQNVTEDKKYLGQEGLYLPMGGETCPPDGVSPADCSKAQEEMRNLRWSYLNSDYYKGVNDRWIAQGCMDKIKREMGYRFVLTSGGYTTNVTPGHLLKVVLRVKNEGYAAPFNPRAVELALRNVSDQTTYVLPLDVDPRKWKPDMESTIEIEAGLPTDMPIGDYDIYLNLPDPMETLRDNPDYSIQLANEGVWEAETGYNSLLMRINVTSDEKTDIYNGDLVFTKKMKKIFRKFTLLLLLVPMLNSCELDPIDYSDINPSIFPQSKEDLEAMVLSCYYPLRGSWWDGINTTSERGQMFVNDACTEILAGKFGAQKYCHELSFNTETTDVTYFYYTRDEPYGFIGKISRCTTVMNMIEKSELSREEKDRYIAEVRCARGYLSYILYDMFGPLVIAPVEVLDEPLNEAPLPRLSREEMVKFIEDDLKFAADNLPYPKDTEYGKFSKGLANMLLIRLYLHETPEDQSYYNKVETIAREMMTADYGYAMVDDYPSLFELAGQSKCTSEYIYIIPCAIDGPSQNQWHMMAMPPDIDGLVQGWATVQSTWYFYDSFEPNDTRKTYLIPEYTTGDGEIRNRENPDQYLDLGPLPQKYEIDPAVPGSGGYSDLDIVVYRYPDVLLSLAEAIVMKPGGSVTQEAVDLMNDVRGRAKLDDKKLSDFPSKESFIDQLLIERAHEFWCESGQYRADLIRFDKLLDRVLELNADQAPYASKYKYVYPLPPSVIVDGKGKVIQNPGYTIMNLLQKVERNHGKHSMKFRFCTRFFVSLILMCGYLGAMAQNIQISGVVKDVVGDPLIGVSVLVKGGTKGTSTDYNGFYTISAPADGTLVFSYVGMDTQEVKIGGSKKLDVTMTENGNYIDEVVVIGYGTVKKRDLTGSVSSVKSDDLNLAVAPSVAHALQGKAAGLVISQNSAQPGGGLDIRVRGEGSINGSKTPLYVVDGFPITELEQPSTTNERMVAGTQSVLNFINPADIESIEVLKDASATAIYGSRAANGVVLITTKRGKEGRTVVSYSGSYSIQQYTDNYDVYNLKEWMNAMNTATWDLWMYENNVYPYGNRTLQEAIDSPKNGVAYKLSFTDKQIAAAGEGTDWLDLITRNGSVQQHNVSVQGGSKNTNFMMSLNYYDNRGIIENSGMKRYSAKINVDQVINKYFKTGVNITASRIANDNTQLGAEEYEKSGMIRAAVQMNPNIPAQDEDGNYPVNPQLPTQPNPASLLLNTDKGLMDRILANAYVTYEPIKDLVFKFSMGMDRAHQSRKTYMPKETLFGGLSDGIATISENDSEKYLIETTGSYMKEFNRNHRINAVVGWSAEFNKDYYVSAGNNGFITDAFLWNSLQSGEGTKQVASGGSENKIYSAFARVGYTFMDRYLLTATFRADGASVFARNHKWGYFPSVALAWNMAEEPFMEPARSVVSMLKPRVSYGTVGNATGVTNNAFAAYYAQLAYNKQDNSQQTGVFLGRLENPDLKWETTKEFNVGLDFALFDGRIGGTFEFFERRITDLLTDKPLNTYHDLTFVSANIGTTGGRGFEFTLNTKNIVTKDFSWFSDITFSRVKNWWVEHTTDWKPSVYEGDNDPIRAIYSRKAIGIMQEGDEAPAAQPDLKPGQLIIEDLNGYLRDPETGDPVVRNGRFVLTGKPDGIIDDADNRLLGSSDPGFTIGFNNTFRYKGFDLNFNFYGSFDRVMMDPTRMAYGVSAWGMAQYGYNGLRCLDDRWMPDNPSTKNPSSFFSGSTYGYGDWFYEDAWYIRLQNITLGYTVPSTATTRKIFQNMRFHVDVNNVFVITPYGGLDPETDSYAAAYPNARTFTVGVDIKFMKHIDKYTIISILSSFLLFSCSEGLEIKSGPMILSVDKDMHMTVGLTGNDAPLTEKSQTEYIELEEGTVSDFKLKHRDIRVAGDTTVYTLIGEASMPFGGTIKKIQTISVDSRFPGMAVTEVKYVNESSRDLHVVKWVNHAFRVIDNEDTPAFWSFQGQSTIERADWILPVDSTFYQRNYMGMNDSDYGGGIPVTCLWRRDQGIAVGHVELSPRLVSLPVKKSKYDNYAEVAVESAEESVVAFTQGDTISTVRTFVSVYEGDCFAPLRQFSEYMQASGLVMPESEPAAFEPMWCAWGYEREATFAEILGTLPKVKELGIKWATVDDGYQIAEGDWELDTKRFPGGDRDMVDLVKKMKAYGLKVQLWWAPLAADPGTKVLKENPDFITLSKQQTPHYITWWDSYYLSPVDSGVVSYSRDLVDRFMKKYDFDGLKLDGQHLNSVHPDYNWKHHPECPQYSYEQLPGFFKMIYDESRSINPHAVIQNCPCGCCMSFYNLPYTNQTVASDPTSSWQVRLKGYVYKALVPRTAYFGDHVELSDNGDDFASSFGIGAVLGTKFTWPKNNPKVKADYRLTPEKEVIWKKWFSLYNEKMLSTGEYVNGLYDIGYSRPEAHVIRKDGTLYYAFYASSFDGDILVKGLEEGKKYELYDYFNEVSLGEVEGPEARLHCKFERALLFQANEVKKMKHCYLFLVALLFVSTGYGQENILLEEYMPKSIYKIPETKVEKAKYPVIDAHSHDYPSSLEEVAQWVKTMDRKGIEKTVVLTGYTGASFDSIVEVYAPYKDRFDLWCGLDLSDYGKSSFVKTAVEELKRCHKMGAKGVGEVTDKGLGVYVAFQTNMAEGIHLNDPLMSPIYETCAELGMPLNIHVAEPYWMYLPDDKYNDGLMNGKKWKIDMSIPGMQSHEQLIAQFSEAVKNHPNTLFVACHFINCSYDLSIVGRLLDEYSNLYVDMSARFGETASIPRYMKKFYTRYADRILYGTDNGMSAEMYETTFRILETDDEHFYVPDYHYHWYYSGFDLPDEVLRKIYRENFIRIMKMKVQEKLKQFQLERKAILATNFYNYETLKGILEAASRVQAPVMLQLTRSSIDYMGLKRAVVLARQGLEDYRLDGCIHLDHGGSVELVQRCLDAGFESVMIDASEKSMEENIETTCKVVEMARPYGANVEAELGYVPKLGQMQDSSGFTTVEDAVRFVRATQVDALAVAIGSAHGFYKSTPRLDIDRLAEIHAATDVVLVLHGSSGIPHDMVREAIRNGIAKVNLATEIKDTFMRALKQTLQNSDEIDLRKVFPKATDSVVELLCDKYKMVGSATEMKPYDILAIGELNVDLILNNIDGEPEVGKEKFAGDMILTLGSSTAIFAANAAALGAKVGFVGMIGQDTLGNLIRESLEAKGVDTSMLIETDEHSSGATIVLNYGEDRAMVTYQGAMAVMSFADIDKSVFEKCRHIHISSIFLQPALKADLEKILDYARVQGVTTSLDTQWDPTEIWDFDYTRILPLVSVFLPNEKELMLLTSSETIDEAVGKIKPYVNTAIIKMGSKGSLLVRRGEEPAFLPSFLNTEVVDAIGAGDSFNAGCISRFVKGETLEDCQRFGNLTGAINTTAAGGTGAFADKKTIEEIARNRFNQHITLMKTTQPKTEYILRRIAELKETQHISRTLLAVCPNSMAVIKAAFRSAKRNNAPIKFAATLNQVDCDGGYTGMTQSVFTDVLRMESRAVDYTGPYIVAVDHGGPWLKDIQSVEKWDTDRAMAAVKKSFEAAVAAGYDLIHVDPTVDIHVPKGEIIDIHLVAKRTVELIEHTETFRRSNGFPPVSYEVGTEEVHGGLADESVFDTFIVELKAGLRACGLDDVWPCFIVGKVGTDLHTVTFDKEVARKLTAKVAKFGSYIKGHYTDGVLNPEDYPLCGMGAANVGPEFTISEYDALMELEGIEKRLHAEGRVAVCSDMKNVLWKLVDESNRWRKWLLESEKGHHFNELSEERKLWLVRTSCRYIWQKPEAIVARNQLYENLNRNGYESEDIVLMRIEHDMDKYFNAFNLVNLNDYLLMDLSDHKTATYCEIMQQPDVWLKAYDLVCRNEAAIQTFISNNHIGKDTEIILAGAGTSAFIGNALAGIFVEKGYSQCRAVATTDIITYPESCLPTGKPVVLISFARSGNSPESLAAVHIADKYCKKVFHIIITCNETGDLARESSRDNVLLVLLPPETNDKGLAMTSSFTTMALVSILIFNIEQLPEQKSKIEAIVTFARDILKNGEKSLSEIAARKFGRAVFLGSGALKGIAEECHLKLQELTDGLVVCKFDSFLGFRHGPKAVINKDTVLVYLCSDDEKVFHYERDLIRQINENNKVVAQIVVSPSGIVIPGVNLDCVVAATNPGELQKNEYACIPYVLVGQLLGYFKSENLGLNPDEPSVSGNISRVVEGVKIYDLMFRLLKYIIKQRFIDIIFIKLWCILKKQSTLVIKMETYYSAKERRAQILQLLKSSPKILVSSLSQMFNISEVTIRKDLEELENRNLLIRVRGGAIRLPKLNIAEEQATTEKKRFHYREKRSIGRMAATLIQENETIILDSGSTTMEIAKNLHSFKQLTIITNAIDIAIELSKYKRFNVILLGGHLRDSSLSTVGPIAENTLKIFYCDKLFLGVDSFNLERGVSTPNIEEANINQTMITMVKETIAVFDSSKVNKKSFAFIAPVSKLSAIVTDNNMPLDIKTQIKKMGVKLYETEPDSMKKRFKTIAFVCLATMAVVSCDENNDNPIPSGETFDLGDGSNAYEISSNMTLTYPNTYNLRGFVYVTEGATLTIEPGVVIKGEKESKATLIVERGGKLIAEGTSERPIVFTSAQAPGKRKPGDWGGIILLGKAKNNMGEQTIEGGVRSKHGGNDDTDNSGVLKYVRCEFAGIEYSTDNEINAITFGSVGSGTTVDYVQVSYSGDDSYEWFGGSVNCKHLVALGTWDDDFDTDNGFSGKLQFLAALRNPKIGDKSASNGFESDNCADAATVEPYTSCVFANVSMFGPVLDPTNYTNEAGVNGSLTDARFQAAMHLRRNTQLRVFNSVFAGFPIGLIIENDKNSKTQTHATEGKLVVSNCVFAGMVKNYQDAQYWANGTQFDPSDNGAFADSYFNREGGKNIAYTAIDDLKLQGDPQNLTSFCMVPSQDSPLISLSADWSHSLVSSGFEQVAYIGAFGPTETAANNWTTGWTNMDPQNTVYMYKSGLLAVVLGFVFSIHALGITALAGSLITGEVRDKKSGEAIIGATVQIENSSVATATDLDGKFSLKNIPIGKQTIVCRYLSYKTVRVPVNVKQGESIAGLEIEMEEDGVALNEVVVSTYRRNDTEMSLLEGMKAQVQVASGISSQQIAKTLDRDASEVVKRVPGISVIDDRFVVVRGLSQRYNNVWINGNSSPSLESDSRAFSFDMLPSSQIENMIIYKSPAPEIPADFAGGFIRISTKSLPLRNSIQIGYTTGFNTNTQFVKTRLNPGSATDWLGFDLNKRPLPNGMPSHMDVTGSNPAEVTRLTRSFNNDWRVKSYYPIPDQRLSLTINRRFETEGGTDIGMTTYINYSNTYKTIQDITNARFGIYSSDADKPVYLNDYVDNQYSNDVRLGAMHNWAFVFDGKNKLEFRNLFNMLGKNRLTERSGERNVSGLTYREETEMLYQSRLSYLGQLTGNHFLDEKKLHSLAWNMGYSYAYRTEPDRRIVVNQAGMSDGVDVSQLKVGNESIKRYFQSLSDHVFSGSVDYKGTVPMGEILSTVKGGLISEYRTRNYTPREFIYRYENLSLEERAYYLYLPYEEMMSEDWLSADKVFIDEITDKKNAYEAYNIYGAGYGAIELPMGKFNVYAGLRLEYNRLRMKWDKSQSASQVLMTSRNYTDLDLLPSVNATYNFDERNLLRLAYGRSLNRAEFREVSPAVYYDFDLFNEIGGNENLKTCKIDNLDFRYEFYPQRGEVISLGIFYKYFKNPIEWTFIDMGGSLRYNYENALSAQSFGAEIEIRKSLDFLGMRGLSLLLNATLIKSRVRFDESGIVKTEDREMQGQSPYIVNAGLYYQNEKWGLMSSLLYNRLGKRIIGIGKSNSTTNDVSVNIPDTYELPRNSLDFTVSKKFGKLVELKAGVKDIIGEKVVYKQYPQFYDAEGKLQKREQTTKSYKPGRSVSVGITFSFMDKITKINSGEKFTHTSVGKLAEFNGKQFLKDTVGTTGCEISFGTIEPGQAAPFFHSHKQNEEIYIILSGAGDFQVNDTAFPIAEGSIVRVATACNRSIRCTSTEKMLYICIQAKEGSLEQCTMEDGEITQQETKWMNAKKMYLSVFLGVLLLSSCKTARDMVSENDICGEWNVVEIQGEPVRAQSNPFIGFDTKKGRVYGYSGCNRIMGSLDLSRDNKIELGHMASTLMACPDMELEGKLIEVLSTVKNVKRAGKNKIALYASDKEPVMLLSKRFSVVPLSELEGEWDIVKVYGDTLSTDLEVRPGVKFDIADGRISGNSGCNRITGELRSDETVENSISFHGVAATRMMCPDMETEKNILSALNNVRTYGILENGNLVFFTAGGAVVLELKRNKMKKKNFIPFIAIAVLCAACHDKTTLTGDWIEPVPGTTNTIQGFSLKENGEATSINMATLQYKSWAQEDNRLILSGESIGNHQTISFSDTLKIFKLSEDSLILKKGDLVKTYTRPKSIIPATPIQPAISTTFTVKGKLVIGHEVRSFIAEGDTTSYWIIDDSGTLKEEYEKTIGNNSEPYTPVYAELKVIDTGKSNEGFAAEYTGVYHVKEVLNISPIKTEMKSEVEYSGLSESEVLASRERYGENILTPPARTPMWKLFLEKFSDPIIRILLVALLLSVAVAVYHIATGEAGMSALFEPAGIALAILLATVVGFLFEMSAAKKFDILNQVNDDLPVKVIRGGHMLEIPKREIVVGDIVMLNAGDEIPADGILLSAVSVQVNESSLTGEPMATKTTIEADFDKEATYPSNAVMNGSTMLGGYGVMQVTQVGDATEYGKVYTGSQIENNTQTPLDKQLNTLASFITKASYIIAAVIFIARTVIYLTEHPVIDWLLFGSYLLSTAMIAVTVIVVAVPEGLPMSVTLSLAMSMKRMLANNNLVRKMHACETMGAASVICTDKTGTLTQNQMRVHEAAFDYIPESGVEDIIFESIAANSTAHLDKAAGSVKVLGNPTEGALLLWLADRGVDYAALRRHAEVIEQLTFSTERKYMATVVQSPLLNHRVLYVKGAPEYVMNFCSDRVTSSGNVPMTDSRPMLEEKLLQYQNQAMRTLGFAYALVEPDEVCFIAGHLAPHIKLTFLGITAIADPVRKEVPAAVSDCLNAGIKVKIVTGDTPATAREIARQISLWTPEDGDRNIITGPEFAALDDKTLLERIPDLKVIARARPMDKERLVRLLQSQDEVVAVTGDGTNDAPALNAAQVGLSMGDGTSVAKEASDITIIDNSFGSITKAVLWGRSLYRNIQKFILFQMTINVAACLIVLIGAFLGTESPLTVTQMLWVNLIMDTFAALALASLPPDERVMRDKPRHLNDNIVTRPMAGGIIGTGIAFVLLLFGLLQYFKHVDITSLAQFDLSLFFTHFFNFAPVPGGLTRYELTLFFSIFVFLQFWNMFNAKAFGNVQSAFDRLASCKGFLWVTLIILAGQILIVSLGGALFSVTPLQPMDWVYIFVATSAVLWIGEIYRLIRRWIAMMAKPCIPKGTRDFSVEEMAKRNYIFNTIKHVFGLYGFRQIETPAMETLQTLMGKYGEEGDKLLFKVLNSGDFLSDVTETDLEERNLNRLSCRLCEKGLRYDLTVPFARFVVMHRNELTFPFKRYQIQPVWRADRPQKGRYREFYQCDADVVGSDSLLNEVELIQMIDEVFARFGIRVAIKLNNRKILSGIAEWIGAPDKIVDITVAIDKLDKIGLDKVNDELREKGLSEDAIARLQPVILLQGSNEEKLQVLRRELSASEVGLKGIDELEYILRKLSASSLRASFEIDLTLARGLNYYTGAILEVKALDVQIGSITGGGRYDNLTGVFGLTGVSGVGISFGADRIFDVLNQLDLYPKESMESTQVLFVNFGERECEVCLSHLARLRAAGIRAEIYPEAAKMKKQMGYADSTGVEYVALVGENEIAAEKITLKNMTTGEQSLFTIDEVIALFAMNYKNSVNQRQKQIYRILPKYSLSSLFMQRYNIFLFTTFSVLNSMRGFTSVVRLPLFLIVVFTISAAAQEQPENNQFNGLDYTLQKPAKNERYAKKKFGDHLFISGEAGLILDRSAGSLFATPGLGLRAGLTVGDWFSPVHGMRVGLNAGLHNGLAGVNPYFVGLSADYLMNITSLLHKDNPVRMFELIGVAGGEYQLLYRTGNWSHAGGFRLGMQTRFNFSPLTFFYLEPRIGIYSDGIDGIKTWMRYDWEASLMAGLGYRLLSDPVRRKAPFFGADQGFFVSAGGGMATTLTSGSGLLLDPGATAMLSIGNQFTSVSSLRLSGLMRYLKTDELYNKSSFGLQLDYLFNLHALFGGYDPSRLFEMSGVLGAGFHSVAVDDKLHTRWSAGTGLHGEFRLSDHWAVFVEPRVDVFSNESWKDGLSAVDPLPAVLAGFTYRPVSPSFNRSAREEDAFDFPRRIGDLYLTMGAGFAGAMKSSLSNPLPNKGFRIFGGIGTWWNPVSGARLLLNYSSLDAEFSPYRTLAVGGQLDYLLNFSTLFYGYDSNRFFNLNGVAGFNYDYVSSEGYFQHGFGAGIGLQGTFRLNDMFDLFVEPRLNVSQNNRWERNLFSSVDVVPTVTAGLSYNLYAYGMKHGSFEKTVEFRNENFVDHMFYGLNIGAAGILHKGLRTNPLDRIGPMASLYLGKWFTAASGVRLTAGGGAYGDSQPGYRKFGLVQLDYLWNINSTLYGYNPSRIFHATLGVGAVLSYATSYNSGFYPGMGLSLQGLWNVGSGIGLFVEPQVRAFGKKYSRESFAGLPVDMLTSLNVGLQYQLDRYDYKANHAAYDLSDKYFLSLAYTGRVLRRSGDDFAGGHGLAVSVGKWYTPLSAWRLGLDYGYYGAAPRYMSLALSADYMFNLSAFTVRYNSDRLFDLIALGGVYAGVGNSQKKNEFVYGVRAGVQGRFNVSSGIDLFIEPQFLASRVSRNDNGLGFDPEARLMVGLNYKLGGNTVAGGKRTFDKRNYFSVSVGPSLFSETILVDRYRKVSVGADLSFGRWFTSASGMEIGLGYDFIAPHTSKTLCLGTAHVDYLLNLTSLLEPDPDRRFHLIASLGTGIGWSNYNSDGGIGWVAEGGLQFRWNVSRSFDLFAEPSMTLWDDKLYDYIPNTHHFIGVGRISLGTAYRFMLNLNKFCSLFIGLILSVVCALPLSARDINVRGTVTNIEGEPLFRVSIYNAGTNKLIGSTNEDGKYLVKIDSEGELLFTSLGYEECKAAVRGELTVDVVLRHSAVALEEVVVSAKRITDNVVPEPTDIEVKGNYFHIRTRVKIPKELFSTNARMIIQPGVYNVTREQMIFLEPLVFDGKEYAITQERMYDYDSGQDPLSRYVQVKSSSSRKDDLVGYSDSTYVENVNDDFRCDMMVSMENYNRVLYRDTFVIARGVVNPLRFLEYEIPGSAVKNENFFPQPEMQLRDTKGDVNLTFRVNKSDLNLTDGDNREELNRLISRLHQVENDPNARLKSFSIAGTASPEGNYERNKQLAQKRMASAMSLIVKELNESTRRQIDMHTTASVETWDRVVDLLRADNKIREADAIQEIIDKYPDNPNRQSRNVVSLPFYRPLITSRYLPRLRRVSYELLFSQYRYLTDEEIEALYRSDSASLSRNEFWRLYNLADSIAEREAICRRALEVYPKFLVAATDLAAILIDKGEPDSELLLPYLEMPELPDETRLNQVVAWLSAGRYAQADSLAFDLPDTGIYHKAKVYAAALNGRYNEVMQEISAESPFNEVLMLLAIKSNEQAWEKAKLLGNSAKEEYIKAVAANRVDEVVLALSYLESAFKKDPSLRDVASVDGDVLDLLQQEDMKKVFNKCFIILGVILNIQMVNAQRVALKSNLIDWATLSPNLAVEMRLNQRLTLDISAAANPFSFTIADMKATHFRFQPELRYWFNRPMARHFMGISLLGGLYNVKFKEHLYEGDIWAAGLTYGYAFVLSRHWNMEATLGIGMAKLRAFDYREGEEKPATPNLSKWSPVPIRLGLSFSYIFKMVYVLFIVIALVSFAVQRTLQSKFERYSKIPIPYGLTGRDIAMRMLQENGINDVSVTQVDGHLTDHYNPATHTVNLSRDVYYGNSVAAAAVAAHECGHAVQHARSYSFLNLRSALVPFVSFASNWVQWILLIGILTIQAYPAIMLLGIILFAATTLFSFITLPVEINASQRALAWLNGAGVTDASTHDKAKDALKWAAYTYVVAALGSLATLVYYIIIFAGGRRDSMQGEKQYKTGLDVGSTTAKIVIIDESGQTVFSRYERHNAQVNDLLSAYFREARQELGDIETSIAVTGSVGMGTAEQLRTEFIQEVVAATRYAQQLYPSASALIDIGGEDAKVVLFQGNHIDLRMNGNCAGGTGAFIDQMAVLLGVDIEELSRLALQAEHIHPIAARCGVFSKTDIQNLVSRNVPLGDIAASIFHAVAVQTIVTLSRGWTFHPPILLCGGPLTFIPALRKAFADYLHLQESDFILPAGGNLLPALGCALCATEEKAVSLSTLENLISRSTNITTKNSLPPLFDSETDYDNWKKEKAHYNWPSAPLVQGIQEAVLGIDSGSTTTKIVVTTPDGAILFSHYAPNLGNPIEAVRKGLTELKTQCDKNGTVLNITGSCSTGYGEELIKAAFGLDGSMIETMAHYRAARQMAPDVSFILDIGGQDMKAIFVKQGAITRMELNEACSSGCGSFIETFARTLKYNVSDFARFACMALHPCDLGTRCTVFMNSKIKQVLREGATVVDIAAGLSYSVVKNCLYKVLKLKDDKELEGTIVVQGGTMHNDAIVRAFELETGKTVIRSNLPELMGAYGCALQAASQKSNSRTINQLLETTGYTSRQIQCNGCENKCFVCRYTFPNGNTFFSGNKCERIFTNRGESEKPGQNIYTDKYALLFDREIPETGNKTIGIPRVLNMYENYPFWHALFTRCGIRVVLSDISTFVSYEKALNSVMSDNICFPAKLMHSHIQNLIHKKVERIFLPYVVYEHESDKKMNNSYNCPIVTGYSDVIRSSMSPDIPVDSPAITFADTGLLTKQCTNYLSSWGISKRDAEQAVKYALNAQKQYSSDIRRKAENIVRESRRKEEPVILLAGRPYHTDPLIQHKLSEMIANLGVNVISDDIVRDNSEIETQDTYLIKQWAYMNRILKAAEWTARQGNDIQFVQMTSFGCGPDAFLLDEVRDILHRNGKPFTLLKIDDVNNIGSLKLRVRSLVESLKQTPLRGTTEKFRTTEVFRKKDRNRKIIAPFMSEYITPLLKPIFKLSGYDIEVLPPSDASSAETGLKYANNEVCYPATLIVGDIINALESGKYDLDNTAVAITQTGGQCRATNYLALIKRAMLDARFGNVPVVTLGLGRKVSNEQEGFELKWQKVLPVALNALLYTDTLSKFYHASVVREKERGAAARLRDKYLNLAERPILENEPHKLVEYIHLAAREFNDICMDKTCPKIGVVGEIFLKFNSYAHQHVVRFLCEQGIEVAPPILLPFFMQGFVNRENKEKLLLEKKRIPHFLSDLFYRYIDKRIALFNRTASTFRYFTPFTDIYEEAEETKNIVSGAAQFGEGWLLPAEIIAFTKQGINNVISLQPFGCIANHIVSKGIEKKLRMLYPELNLLSLDFDSGVSSVNVTNRLLLFTHNLSAMNSTSTIAHQKTEQTENIESRIIEAAKQEFIKKGFEQTSMSDIAAVVGINRPTLHYYFRTKDKMFQAVFASIVAKFLPHIDTIFSTQQSFSEKLEDVIDVYVSIFSTNPLLPKFIIGEIQRDANHLIETFYSLNLDQYLKHIGEFLEKEMESGNFKKVPLPFIFMTLYSQLAFPFLSKNLTMKLFFNEDKDTFNAFLQEWKQHIISQITYLLKPMLSKKMEEALNAQVNAEFWSAYLYLSMSNHFAAAGNQGFANWFSIQFQEEQAHATIFMKYVLSCGGKVTLAPIAGVKTEWKSPLEAFEDTLAHERKVTALIHGLCVLADEEKDFGTANMLKWFVDEQIEEEANAQELIDSLKMIKDNGFGLYMLDKELKARVYTTPAPLATSAEMRKILLVFAVCVCSAVFAENIVLDLSNPGDFPIEYDESGLWADVFNNDAIVYSQEFMFSHASPYSNYSNGFFASKVTAISASAGTDDQWGCMAKGGFAGEGTPYLGAYWDAYTESTSDTKTCEVYTSAPYYAVGCYVCNNPYVYYAIEKGNPYSTKFEQGDWFKLVAHGIDEQGTETGTVEYYLADYRSENADDWKLNDTWEWVDLSELGQIASIYFTMESSDTGDYGINTPTYFCLDKLTVSTEPSSVEESVAAQMKVYYDRSNGAVRVESAQLVEAAVYNMSGTLVMKQLVEGSGAIDMSAYPAGVYIVRCGGYSTKIVKMSVRAVSFSDINYWIGEGNVEAMLVIAWNDGKTPGALAWGYKGEEETTIVEMLNDVVKTDPRLFSLMRRQGGYTVDGLGFDLNGENTVALVVGGDTTYPKYNATGQFTATPNNFKKWECVDKEDHWNSPSVSEDGVWHCLARSESGNEAETEINKMPIQNRYTYIFYYDKPGSDTPDYANAVAVEPYIQEAVDYSQGIFFVNEDWYGWDNGTINFLTNDGRMVYRIFRRENPDEKLGVTTQFGTIYGEKFFLISKQAKSTEEESTGGRLVVADALSLEKIAAFDQIGGGDGRSFLGVDEKTGYIGSSSGIFVFDIENMKVGDVIEGTSNDEGLYSGQIGSMVRAGKYVFAAKQSEGVLVIDAENHTLQTTIELPSIATLVLGRDGNIWAADGNALVRINPVSFETWTRSLPSGCRVTDTWGAWNAGSLCAAYKSNLLYFADESKNKVVRYNIDTDELNASFFTLPDQDGEYVQMFYGAGLRVDPQTDNVVVTSTESGYLSHYMNNWIHIVDGTNGELLNTLLPEKYYWFPAMPVFPDNEYPVISISDNLSVGSSPVKISLLESVSDADNLSAAVVSTVKVEDPSILSARIEGYDLILSGEKLGDTSFSLTVNSNGRVETKMVSVHVTEVSGIEDAESLKIVASPNPVRDILTVRACVGAELTVFDLRGVAVYRDTMVGSKSRLNVSSLPAGIYVLSVCANDRTEYIRIIKQMRKIYALMVLLFAVLQLPAQVLVQGRPHPTAKPQMVSPRAIVDGTFTMDMIENWSGEGANRAAFVVQWNAESETSALVWGFRWDGEATGETMARAIAASDPRFFIMTETGTAYGSTVSGFGYDVNKSGDFSITKDGVTLSPDENGIIFSSSYGYDGWTCTDPEDYWQSGWYQGYWSYWLKSSDSDPWGYSGTGITGRKLTDGCWDGWNFSVNMSPQSWKPLAPAPKNGPTAPSVKVQPEDLTVSPGESVTFAPEFKGDSLYFQWYKDEVAIQDAEASSYSIVSAETSDAGRYYCVVSNMLDTISTDTVTLVVGDKSVVTAPGEEPGTALVVYDDSYASFSGILTIPQTILIEGESYTVVGIDDMAFMGCAKLTSVIFPSTLKTIGEGAFYGCSRLTSVELPAQTVSIGNEVFGDCPLLATLSLGEGLESIGRSAFENCIALTGVSMPAGMESIGALAFKGCTKLASAALGNSLTLLGDSAFYGCSALQSVELPVTVSSVGTRTFAGCSALNAVGLGNVSAIGEAAFNGCSALTEIAIPNGVETLGNYAFYGCSALATVTLGTQERSSSSLKTIGDYAFAETAVKSVVLPDGVSTLGNYAFNKCASLATVSLGNSLTAIGNYAFSDCEKLESVTFGSALETIGERAFASAKISSLVLPATVRTIGDWAFYNNPLTAITFNDGLQSIGSRAFYGVSVQTLNIPNSVTELGSYAFSGCKSLETVTIGTGVTKISEFTFNTCSALTQISCPSVTEIGASAFKGCSSLVDIPLNDKITSLGNYVFSGCSAIESLVIPNSVTSIGSYAFEKCTKLTSATLGTGISSIPDYMFSSCSALTSVVLPENITGIGKYAFQSTAFTELPLTASITEIKDYAFKSCTKLTSVAIPDRVTKLGTYVFQSCTGLESAKIGGGVTSVPNYMFHGCTNLVNVELSEKVTSIGNSAFYNCKGLKSLPVTESITSIGTNAFYGCTSLTSVNLSDKVTSLGASAFYGCSSLTEAVLGTGITTLGSSLFRNDAKLKKVVANGKIASVSTYTFNGCSSLERIYINNTPPTGASSNTFTKVPTTCRIYVPAQTCQFYAQTTYWKDFVIMPWLDELEIVSTTPSMSFDGEEALDVKPDTKTFVIEFNRTVVNTDSVSAMLIRSGFPVEDQELTVSYSGNEVTVIREGEDLPNDPYYYLVLTTSDKQFSILFKVTTATGIDDLAVEKEVRLREYYSVDGKLLPCPVEGINIVKTVYEDGSIEVSKVYVKPEDCRRMKKVWYVLSMALILLIASCQSDNPSMITLGLDDTYVVERMKGLTLHPGFTGERYEWALSYESDSVSVTDSIVATTRDYTFVASETGTYRLRFQIYDAANPITHLMRIVVRKEEVAYSPYITKVYEYRPAPGQFVNELPRYTEGDTEESMRQKVEDCLAYDARTMVTLGGYGGYIVVGFDHTIVNRPGEYDFKILGNAFYANDNPRPDAPLGGSSEPGIVMVSVDTNGNGVPDDEWYELAGSEYYKKETLKNYEITYYRPDENKEPVTCSNPNITDSTYVRWTDNYGNTGYISQLTFHKQPYYPQWISESSITFKGSRLADNAIDESGNGSYYVLYAYDWGYADNHPNSSEKSNFKIDWAVDSEGNPVDLPGVDFIKIYTGVNQFNGWLGECSTEVMGVTDLHIEEMRSVVAHIVSCILLAGISLMTSCREDEVIILAEYERLPLGDNSRSDYAGLYLLNEGNMGSNKCTLDFVDFDNGYYVRNLYAEKNPNVVKELGDVGNDVQIYGSKMYAVINCSHKVEVLDARSCQRLGQVDIPNCRYIAFDKGFAYVSAYVGPVGIDPNAQLGAVFQVDTATLEITAEVTVGYQPDELVIQDGLIYVANSGGYRKPNYDNTVSVIDIETMTQIRKIPVGINLHRIRADKYGKLWVSSRGDYEKIPSRLFVLEKDKRTNRMEVRDTLNVSCSEMDICGDSLYLYSVEWSNISQENNVTYGIIDVRTGELISNSFIKDGTETDIEIPYGLKVNPETGDVYVTDAKNYVSSGNLHCYGRDGIRKWSVRTGDIPAHMAFLYKNKMKTFYRCVWGMMVSLLCGVGQANADSSSLDSIQTLGEVMVTANRYNEVIPSQKLTGKELKALNSFSVADAIRYFSGLQIKDYGGVGGLKTVNIRSMGTNHMGVYYNGIQLGNAQNGQVDLGKFSLENIEEISLYNGQKSEIFQSAREFGSAGSIYLTTRRPKFKPGEKSHLKASVKAGSFDLLNPSVLFEYKLSETVSMTFNSEWINSSGKYKFRYRRVTPSGETAYDTTATRKNGDIDAVRFEGGLQGYLPNGYWKAYVYHYSSERGIPGAIVNNVWRNGERLWDRNSFVQGVYQQDITRKYGIKVNAKYAFDYTHYMNNDDKLMRVDNQYKQREVYVSVANKYSIFRNWDVSVAYDMQWNGLSEYMSADRYTHWISAATAFSLADRLKMQASVLATLVDEKASGQVKAPNKSKVTPAVFLSYQPFKKYNWVFRAFYKQIYRMPTFNDLYYADMGNSVLKPESATQYNVGFTYAVAPKTGFLSGFHAGADVYYNLVSDKIIAYPKGQQFRWTMLNLGKVDIRGVDVQATATFRLPYEISLMTKVQYTYQEAIDITSPRDNYYRDQIPYIPWHSGSAILNLSYDDWSLNYSFVYVGERYNQQENIEYNYVQPWYTSDISLVKSFRIKSVNLKVTAEVNNVFDQAYDVVLNYPMPMRNYRFGIAIELMEENKILKNNSIPLKIWRFYMEGFRNMTLGKTLWAIILIKLFIMFFILRLFFFPNILQQKYDTDEERANQVIENLITPNNPKNQQSMNDLFSLVDWSRAQFALTAIYHWLFVPLTLGLGVIVGIMETIYYRTGDERWKTITKYWMTLFGVNFAIGVATGIILEFQFGTNWSNYSWFVGDIFGAPLAIEGIMAFFMEATFIAVMFFGWNKVSKRFHLASTWLTAIGATISALWILVANSWMQYPVGMKFDPETARNVMDDFWALVLSPVAVNKFFHAVSSGWVLGGIFVVGVSAWYLIKNRENFLARNSIRVGAWVGLIGTLVVAYTGDGSAYQVADKQPMKLAAMEGVYNGKNGQELIAFGILNPDKKYDNDEKEFLFDIPIPKLLSILATREIDGFVPGINDIINGGYVDKNLKGEEIIALSAQEKMERGRLAIAALADFNTARKDNDTEAMNEAKARLEANYEYFGYGYIDSVEQLIPHVPFVFYSFHIMIILGGYFLLFFIFILVLSYKEKLQKLKWVLWIAVLTIPLGYVCLESGWIVAEMGRQPWVIQDIMPTFAAISNIEVASVQTTFWMFAVLFTVLLIAEVGIMLKQIKKGTEQKMELNELFYQNYWWFLISLLGALLVFLLFVQGGQSLLAVMGKTETEKSMMVNSLGRKWEFTFTTLVVFGGAFFASFPLFYSTSFGGAYWLWMAILFSFIIQAVSYEYRSKSGNFLGKKTYDTFLLINGIVGPVLLGIAVGSFFTGSDFIVDKGNLTTIGSPVISSWTNDWHGLEAILDVRNLLLGFTVLFLARTQGALYFMNNIKNDSIFEKSRKQVLFNGVLFVILFLSFVTATLLADGYEVATDSGIIAVRPYKYFFNFVEMPWVAILFLAGVVLVLYALIRSVFGQHFTKGIWFSGIGTILVVLSLFFIAGYNHTAYYPSSVDMQSSLTIYNSSSSLFTLKTMSIVSLLIPFVLAYIVYVWRAMDAKPITAQEMESNEHKYMDDTYLTISRTSEGIYKEKMSKFLAFAIPVSSVEDVKKQLEKYQKEYYDARHVCWAYMLGPQRTDFRSNDNGEPSGTAGKPILGQINSAGLTDILIVVVRYFGGIKLGTSGLIVAYREAASEAIAANEIIERQVEDEVHFGFEYPLMNEVMRIVKEEGPTIVSQIFDMDCEMTLRIRRSLMDNLKKRLSKVDGVHFINEEMTEKEKMEKGELYDAAIPELIEQLLSTRDKIFELNHLRPSQLEEREKLIREIIGTTPEKFIIISPFFCDYGHNIHLGKNFFANYNCVMLDEAPITIGDNVFIAPNVSFYTAGHPSDVERRNEWLEYAWPITVGNNVWICGGVTITPGVTIGDNSIIAAGSVVTNDIPSNVIAGGNPCRVIRTITEKDKLRSFSWEEKKAKKQVKPAMESFARLLIAIPLVSYVLAVLSLWVGLQINSFIFPIAVCISVLWECSDRRIRGCVRWTTTVAVLVVLSVTLGLSACIYDRSFDGQWYHACTIRELVNGWNPIYSFACSLTPIDGYTVLWVEHYPRGIETIAATIVSCMGNLDAGKALNLWFVFSSIVYIYLFLCYCLPTMNKYLRIWIALVVALNPVVINQMCTYYIDWTLYTLLVIFLINMYLFFVKGIQRTLHIDLLLLFFIPAIKFNIFFWVVLWGGICFFALLRKSRYKHSFRLTAVCAVVVLLGIGVGAYNPYLTNWKEHGSPVYPLSGNGKVDIMDCQVLPAIRGKSNAEAALISVASNPSDDMLSEDIHVFGISKIDILSSVASDVRIGGFGIFFFEAILLSIVLFVCTGHIRRMRWYLSVLVGLLVSLVILPSGWWARYVAFFYLFPFVMLFYAERFGLKTRFSRGLHILILSLLSADIFICLSGLAVKNIVYKETIDYVLEKMESSPGEAKLYTRNYSFLDKLERRSIPYKLFPDTEMKDKLDIPCPIYMNRTDFDFETDQPWILSLRPSFQLKWSDNNRYEGQDEMSELLCKVLFIDLDDTIWDFKANSVLSLRQVYDEFALKKEIPDYDRFKSLYMATNHELWELYHHNRITKDYLIVERFSRPLRHAGSKMSEDKEFIMALNDRYLDVLSQQNTLVPGAVELLDYLTERGYPLYILSNGFAEVQSRKLESGGISHYFKRLILSDEIGITKPDRRLFDYALQIVGAEASETLIVGDNYDADILGAMNAGWKTIYFNRDNLVIPGARPDYTATSLSEIKQILMIKLGRDYWSKLLLIGLIFGFVACGSKDEPSKEGDNTPSFPVTTDTTSVLVKKILSRTDLVVKVNRVTTEERYPGLVFSEIDFHTAKARQHAYVAEVDVNKLTIATTTPFGEVNTMPTKVNTIPEQTKYLENSGRRVHVAVNGGFWVYEKDSKGETTLIKPKHLFWKDGYPLSDWWQDPNHEFTVYMTKDGKVDIDIASNVIKHKADIYQALGGLGCLIKRGVFNDGISSIGTYLCDTHPRTAIGLSEDKQTLYVVVVDGRRTNYAEGLDIYELADFMWGIGSYDAVNYDGGGSSTMVLRDEDEKAKASFIVRNRPSDGSPRAVGNGLAIVEKDMDKQIVILNMKSRFLLSVVFFGMIAGLSASPVYRMGSYNIRGENAADTGDKDWNVRKEYVVRNIVEHDFDVVGLQENSIKMLPQLEELLGDDYATHSWGAISETSGTHTTIVYKAGKFTLLDKGQYFLTSNPAAPDLSWDTAVRRNTVWVKLQDKTTGDVFFYFSTHLDHKGVLARAEGARINVQKMQEIADGYPAIIVGDFNAYYAEKAMYNTFNAYLDDSRKVTQTAPVGPGTTFAQWNPAVTGGEPIDYVFCDRVNVLSYETITEDFGRGITPSDHLPILITCTFKDNLERGKWYVSTTPSAVPDGSKNAPFNNLQEAIDVASKHDTIFMTGGVFYPVETSSHAGRQATVNVYKSVRIHGGYDESFSSVVGKTELSGDLNRNDVTDESGRIASGAEDNVYHIMTVADSCFVELDGLKLTGGYADVTGFNSGAAIYSKGIDLILKDVELCDNYALAYGGAIYSGGNLNINRTMFARNQSGSQGGAFYLASPGWRSHISDSYFVQNRATQGSSGYSDGVIFSLLSGNTIADNVSSRNGVYTQMGESEYMVSTFVNNTFVNNRLTAKSSSLSDKTNGGSAIYFKSGSGSLNLVNNTIVGNTDSCYTTSGVPSVNFNGSAVHVISGKVRLVNNIIAGNFSSAATAGEVYLGESASLQNSTYNLYGGADRMNITAKSTDMVCRNYDRCVQDLQKVLDSEIVDGKLSLLLSDNGGFAPTVKVKSVACGNNNLNVLSVAALRESTFYIDINDNGVYTDNLAVDGRGVIRNTTGSMIGAYEYTGESGMEPNVQQNSIRVFVSEDNLYVISDSFTVGYTIYNLSGSLQMKGEAVSGRPVDVSILPAGVYMVETNDRSGGIEFTKVLKNNMKLKIYLWLVLWLTVCNSYASVTWKVWNTDYRVDTTFHAKIGPGTTQTSLLLTGPDTTLTVFYLTVDLTDPYVDIRTVCATDHLAGAQTVTQMAESHSVEGESLYFAGINGGFFAMSGTANDGKTSIVGRPHHASVAEGEIYRTSTSAICRHFGITSDKVPYLSNVSVDFAGTITTATDSYAISGVNVNAGNNKIILYTDKMPGQVTQVTGSSFPMYYEVALMPKAGERLVPGKPCKMTVKGAWARGTNMVIPDGGYVISGKGLAGPFIQSLNDGDEVEVNLPMSFDGETVMVEHLTTGNPKILGNGEVLNTEGERADAIEWHPRTSIGYSKDKKKLIMLVCDGRTEISRGVRTRELADLMRYAGADEALNLDGGGSSTLYTSMLGVRNYPSSKGVQRKVGDGVFVVSTAPASSFVGGIDFATPPHVISKGEEYSPTVYGYNAYGLLINTEVSNYTITCDERIGYVKADGKTFVADGIGLGKIYARTPAGYTCEMEVVVKEDIDNIVFRLDSVVSDCHYEYPVEVSMTKSTGEVVPLNPSALSWSSSDEHVAFVENGVLKGLQNGMAEICGSISGVSDTLKVKVQEPSKHVLNINDGTPDWLKVSFTTSAGFKNTSVTNSEKEGLQISFLYNSTSAKTISLAGDIPLYSLPDTLRIHINPGEVKVKTFSCTLKLPSKKTVAVDLPIPEANKENICDIAFPDVLGDVFDIANYPLVLSHFTLGMDINTLGQNYRIDIPAVELVYNYYNENALDVQTIEGKSLDLSVLGRTILLGKAVDRVELYNVSGCLISLTENSNHISAPGIGMYIVRIVTEGKVFSQKIWINRMKRKLTSCLLVAGFMLATAPSAFATTYFIKVDGSDDTDGSSWEQAISYDYFAENMEQGNFADGDVFCFAGGVYKLSSPDFDKYLAINRSVTLLGGFDPVSTGTNTDITYPSPYETVISGAIESDVAAVPGNRTHLWYMQRREEIDGVDTKTRLNITVKGFTFKHAFRNYDSASNYKGAVMVFNTDLDMQWCNFIQNGAAFIGTSGLTLIASDANVSDCVFSENFSSEKGTALGLFTSSTYAGDEYLTQAVVQRCQFTDNYFTTDYYPESECGEDGKPAYTNKLRGSAIFLGSSDERVRLYLVNSLVADNYTEGFGVVMGYPGTTMYMISNTIANKDYTAEQEARTVAGNNNTTKDVGRGLGVMSYGGYNYMANNYIVNAVLGESAPSNPAILLSRNSATRPGTWNSGGYNISGTAWYCTTWATPRDRTQTPEIQATSLLYLSGNDKETYTYADVFGETTFGDNGGNTQTLVPATRMLSLTLDELNALKTEWSLPENIDLTVDQRGYKRAATTCVGAYDGDATSGITGLTNVSKVSVSTLGNGIFQVNGADTDVTVYNLSGNVVKVVPANEVIDLSSAAKGVYIMTVGGQAFKVIKMKKYLYIFCTLTGAALMGCTDLDLIPEDTMAPENYFSSEEELRQYTNAYYGMLPGADDLNDICADDVIKNILDNEILGNRYPSTEKAWDWDDLRVINYYFENSGACKDQNARRHYDGFSYFMRAYFYFTKVQRYGDVPYYDEVIGSKDEELLYKPRDSRKYVMQKVVEDLDSAIYMLPETKTPYEVNKWTALALKSRATLFEGTFRKYHNLGDWEEMLQQSAAASLELIQKGGFSLYKTGSTPYRDLFARLDAPAEEIILGRRYSTELSILHNSQCNSMAGNQRVSFTKRFVDHYLMADGSRYTDKPGHEKNEFVAEVTGRDPRLSQTILTPGYVQKGTTKEMINTLSKYTLTGYQYIKYVMEPKYDQSNKSPMYFPLFRLAEVYLNYAEAKAELGTLTQDDLDISVNLLRDRAGMEDAHIDMDEANANPDLYLMADVTGYPNVTKSAMTGVILEIRRERTVELCLEGFRLFDIIRWKEGKQLTNEYHGVYFPGEGKYDLNGDGKMETAIYKDQAPSGLGLTKYKLGVDFFLTNDTEGYMWPHKDVKRTWNEERDYLWPIPTEERVLNHNLTQNPGWEDGLSYMNLLTNTLHRRWSCLLLIIAFMSGFQMFAQSVGASNQLTGRVLDEYDQPIIGAVVKVSGTSIGRSTDADGAFTMKDIPANATLEVSYVGYEKQSIPVNGKNFVLVKLKEANQLLNEVVVVGYGTQKKVNLTGAVGTISAKEINARPVSNVAMALQGADPSMNLKMSSGRSSGGYDLNIRGESSISTSNTPLIMVDGVVTELNMVNPNDIESVSILKDASAASIYGATASKGVILITTKTGSDSAGKASVNFNGRFGWSQNTTSTDYMTTGYDQVSLVDKAYYSQYATNFTNYTEEEMQMLYERRNDKTEHPDRPWIVLQDDGSYRYYANFDWYNYLFRKTRPQQEYNLSVTGGNDKVKYYVSGRYNREEGILNINPDTYDTYSTRAKLDVKIKPWLRYSTNVNFFSSSYKYSGLPAIDNTLMEVDKTLMSSWPAKTPEGKAIYAETHANTTINGTPPYLVDNRARHANNQKYIIIGNRFDIDIFKDLVLTVDYSYKYRGRLNKVRNHNLHYSNKQGEEKTIVTGNFKDYYRENHYEDNEHNLNVYGTYTHTWNKAHNFTALAGYQYRGARNTYLSLQQLALLSENLSSFANATGDITRSQTISEWRNSGFFGRVNYDYKSRYLLEVSARYDGTSRFRSDHRWVFVPSASAGWRISEENFWEPIRDVVDNTKIRLSYGKLGNQNTGDTYAYLEEIVTGQTLNYTLDGTSKLQYSKPSDPKTSYLTWETIATWNIGLDMSFLNNRLTFTGDYFIRNTEGMLADSYELPGVFGAKTPDENCADLRTNGWELYLGWNDSFALMGKRFNYTVSATLGDNKTVFTKFNNPEKNLSNHYEGKVLGEIWGYRVDGLFASDEEAAEYTSKINQDAVNERILTDKVDPYYRAGDLKFRDLDGDNVISKGDDTAYDAGDREIIGNETPRYMYSFRLGADWNGFDLGIFFQGVGKRDWYPNYLSTGFWGPYSRAFTSFIPENFMDQCWSEENRDGYFPRFRGYQTFAGSQLGVNNDRYLQDASYIRLKNLTVGYTLPVLKKVFTKLRVYFTGENLWYWSPMLKHTKYIDPEAAGGNGNTGMAYNYSRNFSVGVDITFMLKLFQPAPVIDPLPKERVDKEYKKLRLQVFLGIFIGYAGYYLVRKNFSIAMPALEQMGFDKADLGWALSAVSIAYGISKFVMGTVSDHSNARVFIPLGLIASAVIMTVMGLIPWTVSSLSIMLMFCILFVNGWVQGMGWPPCGRVMVHWFSVRERGVKMSIWNIAHNVGGALMAPLAVFGITIFGVWGGAFYFPAMVAVIIAVIAYLLVRDTPQSCGLPPIELYKPEECTQAYSAEQEKELSTKEILFGHVFNNKLLWIIAFANAFIYFVRYGVLDWAPMYLEQVKHMDLANSSWSYFAFEIAGIFGTILCGWLSDKVFKGRRGPVTIIYMLLVMLAVYIYWNSASAMVTNVAMAAIGFLIYGPVMLIGVSALDLVPKKAAGTAAGFTGLFGYLLGSAVFANIGMGYIFEHFGWDGGFILLLSACAVTVVLMLFCKENRLMKREGLIKQMAEEKRPWDLLIIGGGATGLGVAVDASSRGYRVLLVEQHDFAKATSSRSTKLVHGGVRYLQQGDVSMVVEALHERGRLWRNAPHLVKDMRFIIGNYRWWERPFYTIGLCCYDLLAGRLGLGRSLPLSKKQTLKELPGLLHDHLRGGVVYHDGQFDDSRMAITLMQSAHDHGAICINYMKVTSLIKNDSGKICGAALEDTLEGGTYEVNVKGVVNATGVYVDDIMQMDKPESRKKVRPSQGVHIVVDAAFLGGNSALMIPKTRDGRVLFGVPWHGKAVLGTTDTPLNENSLEPKPLDEEIDFILDQAGQYLTRKPKRSDVLSVFAGLRPLAAPTHSDSKKTKEISRNHKIYVSDSGMLTITGGKWTTYRQMAEEAVNKVAALIGLEPRACVTRKMQLHGYREEVDRSVWDYVYGSDADQIAALIENDASLGELLHIGYTFRVAHVIWAVREEMAQTVEDVLARRVRALFMDARAAMEMAPRVAAIMAREMGKDKNWETEQVKNFTNLAKNYILAMCIIQINFTFVWNKYYNIIMLSIAERHKHILDKLNAQGFVKVLDIARELDVTPVTIRKDLKLLEEKKLLFRTHGSASPVNPHTADINIHIKERINSDAKRRIAHTAIRLLDPNDSIIVASGSTVYAFAEEITDDLNLTVVTASLNVSTLLNRFEHIHVIQLGGTLRKSSFSVIGDLAAQAFDNLTCSKLFMGVDGIDLDFGLTTSNIDEARLNQRMIAASLRTIVLADSSKFGKRGFGKICTLDQVDVIITDSGISPSVAKSIEEAGIELIIAMLNGRNREIIDFAGRVSDVSKRMGYSAGLLLLFLLSLTSLPVEAQSNIQPARPAFNLRRIYVSPEGAGTFDGSSWANAAKGSDLQMILRSTDTWNAINSTLQIWIAAGTYVPTEPLLPGDEQSASFVLKGNQVVVYGGFRGQVFDDLGALVYEGENSLEEREYGNVYSGDRQEPWALKNQTILSGDRLRNDVVGTDNMFSSLDPTQNTTRTDNLHTVVTFDPSSVDVMLDGITIVGGSADGDGNSGRGGGVSLDGIGCGIQRCLFYFNFASKGGAVYMHKNSGSDSQPCFVYNSVLVSNSAFRRDGFGYGGGIYSEAGVVFDNVVYNNNGGGICVYDETSIVNNTIVNNQLYGIGRPADTDVAGSSISVSNSVIWSINPLNHAGLKGFDALVDRVSNCAIVDWDETKGNDNISLLPYNDHTGSVPNFINPTTQIGAILEPVYADLGVSFLLRQNSVLLSKAEGSWMTTLNTYYGTDVSYDIAGKPRIVSKTLDIGAYQYQPVSGRNILYVRQLSPDEPPLADGEVRDGSTWRLAVQDVQMAIDQLYARNVVGEVWVAGGTYYPTAAFTDESGIRGRTERHRSFIMRSGISVYGGFRGQTGDEGINNSTTRPRDPDHLDVQWAFANRTIFSGDVDRNDDSQKGWRWNAGEKKWEQYYGRNSYHVVWFASEGFNERTTKYEAVTAKPLPVETTLDGVVVTGGCADYGERGESTRMGGGIYLTENGVVSNCIVYQNFALTRGGGVMMNNGGMLVNSMVFRNASPGVQVRNGLGGGVYILGNGTVFRTVITNNTARVGGGVYVDEAEYNNPAYEESLDDMYRGVLVNTLVSNNTSSSDAGAVYFDKLGGLSSSTVVKNYCSAVASDQEGNSGGMIVDGYGIVYNSVLWGNATLEHTRQFYGKNGKTAESNVPASIQVYNTALQNLSNTIWGVNTVTQKTYALSDQNSKGRSSIAYDSSFPDFTNVRVGNVDVINNEAGVYQTTAADVEGTQTLDNALRTIYDVQRWVPSEFSALQRKGGSQSEAPYVRYAPVKTQFYVAMTDILSKAFVEPRVLGAFASDRPSLQYSVIEDNGVKKLVIFVDPSVDTDLSGESWESPIISGNSAIEYLAGLPDTEYPGCPREIWVKEGTINPVWKAIGSDRRTSSVVLRGGVSLYGGFNSKLEGTEGSTVPGQTFVPTGSDVAEPIRNPVDFRTVFDGTLAGGNLYHVVTMSDDGEAILDGFHIVNGDASTGSSAIKTGGGVLHEYGTLHIRNCMIENNVATNGAGIVMLGTTKKLVMTNTVVNNNTNTGLSSESFYSAITLTNDARLNHCTIIHNNAPGICAVDGQLRLYNSVLWGNTSTGTIAPEDVQITGSATMLDIRNNAIQYAPEEWNLWSENMQLSIVQGDPMYPSFVNSTRNVGAISSGYDTPLGGPARFEPTCKSPLVIAGDESIVDDPDLVLDADITGHNFAVGGAPDIGAYEATCLNPVGSVLYVRSGPTGTASSPQTSYFGTGDGSSWANAINGNAWYGFDDGLPYDQIEYDSRDATDYITGLQYAVNEAYKASLKKDGSGRIAYETLNYTDYTYNQTNGRSASVQIPVGVDTTALVEVWVAKGEYTSRRGFFMRDAVQVYGGFPEIGTPGKDERNPRIYNTIIQTMTTAEANAVTSLDGYAPYFDMDAGGSTSQFYELNSRYDNANKVRRVLTQPFPYYEDGGRLEAGSQGQASTETNNVALNPFVIETIWDGFIIQNGRTRIRHGKDGGAGVALRKNGRLENCIIRNNYNVASRSRGGGAFCNDGTFSNCSFFNNDMPALGSDYGEQYGGGVYMRYGTLYNCVFAGNSVSGGNSNGQAVYIEVADFYNNTIADNSGSGAAIYCGYWFADGAANIYNTIIYNNSGSSQVQAHSNVVLRTSHCCYPSGSISGVSGANLTQDNIINQVPQFVDRSSGNKENNDYRLQGTSPCINAGNNSPEGIKLPETDMDYTDRFKDCSIDIGAYEIDQSEPIMPAIKTIDGEQVGVIYVTKAANGTVDGSSWANAACEAKLQKALNWAGYIIHNKETYVSGRYRDITRIQVRVAKGTYYPTDVVLPDQPRTASFIIPAGIEVYGGFAGISDDETVEGRNMRLNRTFFNGMIGSSTEESAYRVVTFGMKQHKDNATMPAEGAAYYDDPNPEIALLNGVYIVYGNANHPSDEEWQSGGGVKVTSNGLLQNCAVFNCAASDKGGGVYLAPGGRITGSIVYNNVGANGGGIYADDSSMVVNCTVVDNTTVNNGSGGGISIGVKPIIINSVFWMNDSGNGKNIYGNMSQQVDTTFTGVRYQNYIFNHCAVEGIKVVGFGNMALTSTNENTSTIVGLNAPGFTDPDNLDFTLKRVSALIRAGIGAEQPGSPLMEALHVSRLDLLGTNRFYKEDSSLRDYFEIGAFAYDGIFVIDPAGDTEAEKGADGIYRLYVSQTAQGLANGRSWRNALGDIQQALDYFGNEANFEHDPNKDTRRCEIWVSKGTYNPKTSVKEDNWGTSFILNRYSSIYGGFRGSNLPYYESWIESFKVEPSKRVDATGVWNKGDYSYTLGGDGEITFYPEVKALEDEPSSWFLHFTTDEKSPSSPVVTVNGFQLPHELELPVIATDSTTEYIYDLRYLAIGNTDWATAPVIEAVRVSGLPAGVKLYSATIDNRKNSTTVSTEILDTDILHQTSTGVPYDASVSLNNLSQAEKLNTYSSNVSDYYAAGNSAGAYGMHYCPSPNRASITVSGNDGVVLTNERYRRYFWQEYTYYNDQLGAYFRFPQAVKYERTNPSNRYLHATIRFTDLSKGNEDGRLRIQLYSTAGVRKSLLINGRVSNGEYKLTVDLKTGLVYDGTSSVEITDEENTLSNGDMLSLVSVHPYSGGKAAYTVEISDITIDNKNQSENTVSELDINIVTEEETQAMPSSDQYYEGEAFLSERPRQDWNGNGLLEDFEYANETILSGDIGGGSGNSHVAYYEDSEATRRVVLDGIKMVKGNSSCTDHGGGALCALAPIALRNCQLLLNTADFGGGAVYASDIEIYGSILGGNEAPGKSGGAVYLREGGKSLIVNTVIYNNTASTGSAYYAESGSTSQLINNTIVRNAHAENVSGDVTSGSTVYSASTAGNNLTNTVIWGNDDAERINADHWEIITSAADVDEDAGNFEVFLDRANEAVMGPRFGFPSDYAGAGNYFASADFSLPSLSTLVNRGTNGGTRRLNTVIEMNPDGSVKSTTITTEPVVLDGSGKGYYAVQEVSGRENVPDTLNSKWRITKEPDTYHIIKKDGVDMIDVKEWKEGTIDIGAYEYETVSLTPFGGNILYVKSSEAVSDKENNGETWERATSNIHQAIQVLLLSPNKKDKYIKIASGDYVPFLQDGTSGYSFVLEKPDVGNLEYSTKSLTLRGGYPNNITGTDVAMDNLRDPILYPTYIRGNRSDSKHLVYIDESMDTAGENGALAPVNIEGFTFVGGNAADATGEGSTGAAVYAANGSTTIRNSVFVDNTAAGEKGAAVYLNKGNIYNTVLHSNKAWGLALNGTGNIVSNTIANNSKGGLYARGALVAEPLQIYNNIFWRNYTSAVPTVGDLNNQIDVQNATLYSNAVQVDDATAEQPNAEYVYWNSSAGVVLGDKAANINKTLSSDNEDMSYGPRFEAPDEATPLDKKYNIRPGRKLINTGYRYMTGDSYNKAENDKWYTDLFAYYSFGSVEEPVAPGDSLARVMFVDAGGNRRIAGNSIDIGAYEYQRLFYPNLYVKPNGFGLGSSWDDAMGDLQEAIYSAYYSGDPEESGTYGTVWVAGGDYVLPTTLQWMANVKVYGGFRGTNETKLTQRPGLLEKNAPESILSVEAEGVPVVRSDNDRAAGTIVENWAELNGFHITGSKNSPAVIVADSFAIVNSVIYNNVNPDGAVVETDGLLYNVLVHDNTVKEGSAAVALDEHAAAIHVTAPGEGAQIGGTGKIINTINGEVTSVSGNAYSPLYVGDYITDDTHLRYQLSDQKDAVLFGIGALQETGVDHEGNPVTTIGGYTVPKIRNGKEYTDIIDLSTDCDVLGNVRLFTDKFHGEGEVIRPDYGCFETWNTTPQKVVNVSDNYYPHAGSVVYVGKESEVRLTDALTKDFAPSYLLLHHAAGLRTGEHAVSLYNLAIERDLKPLINDTTASWDMVSLPFSLEVGNGTMLNGVTIDGLPVEAIQAGDESGDDKNRLYLYEYDGAKRAEDLYSVVAPQNSKYWAFENNQMGANVGYLMATPSASDAVTVRFSKSSSALPVYEESAEEGKSILLKQHNLKTLVGGRPHFTYKENMGWNLFGVPYLCSYTTERMSIDHILYTYDPEASRFVSINSWEGNTIAPFSAVFTQTATVKESEELLFAKPVIPLNTLPAPHGVQLKISGSNLSAGCDYVSVVADNVYGEPMNFDMGNDALKMMSFDPRIPQIYVYNEKGVRFAHTQTADIEGETPVGIYTGESGIYEISLTEDSEYDRYDAVVLTDRSTGRKVDLKHAPYSFTVDDRAMETGRFSLSFKTFSDEMQQPTFYSPGKRQLRIVNLQGGESIGIYDTLGRQRASRKAYGESEEFELESGVYMIRIEGSSLIKGKVVVKMWIYNIPACGQIVEYRFNRIGALMLKQRYAIMALLFATWLLGGCGGENSLQPGSPSEPQETASVTLSIYTGREISRAVGLPGDPGTSPEMPDAIENINLFMYVEPKNGAAAYMEHYYIELPESTAYYEFQAIDVPKCTASFYAIVNAGSHYEWDALSTEDEVMALTTIATPSRDLYAGTLLDLELVQMKHSGVIDAGLVASKVDIMYNIGTAISNYNAKPAGQKEHGDCTSAKVVSLKLKNVPKEGKFFAVRSNDPVVDHVVSLTGSSGPGQSAWINGRYDCYLYDSGTLDIELVVQSVYADAYVKMTTYNIHVDTPEDLAVAPYYLLRFDVVGFTQTEYNYRWTASIMKTGDWQRWVVGGIFFALLPLSSGCIDDNMSDCNNFTVRYRIELSTHTQAFSGRMENLNMHFYDGNKSLAYHEYVERERMPSNNIYAITLPANDYHHFAIANISQASCVKCSDLGVASDRYKLSYESAADTVSSHVSELYVGRERFTIADRNQFIEVVLTPCISKTRLHLSYGTDPVVPVKRVEGYVNETATGFLCNDSLYEYDRPVVVQMNEAGKDENGLALFEAVSFPSRNEASAGAKSLNRNPSEENAIWNTDVYVTIGDKITRNTINLTEPLPAGECIEIYGVVRDDGSIDIGHNVQATVAVTIDWKPGGDIDVDIMKTMKTKWTKAGTMFLAAAAVLSSCSNEEVIPGGETPVGERDAVKTSFSFAIPSPVSRATSDDVQGNDNFLGIESLRLMPFSNLSGDYVGANSVLAGATQLTGAEITNGEAKNFVKTFTDVTIPSGDIAFLFYGKAKHDAAYKGVLEMTPDASVTSLTPADIAFTLKNITEGTYTGGSYSTAAALIEAWKTNVTDALATYVGSLTDGEEKNKATELQNGYFSFNSASLENLKLALQYLSDGLNELHTKYSTPAANTAKTSVDNMATELAKDAYKDFPANLPKGAYKLDNGIIVFDENGPGGSGIVTSGSSKAYSYPSSLYYWTNAYPVAYSTLPTFTNWNNGVYNGARTPITVATTKIALNKTINYGVARLDVKAAFKSADGTVPAGKNTKVTLANHNFVVKGILIGGLPDKLDWEMHPSAADTYSKIVYDNRMNTNDYELTKAATPDFAGMTPFIYSLLPETADCSTGNAEDLGHTPNIALEVLNDGPQFYGLDGNLVPEGGTFYLVGKLTYKKDNSKSEVVRVFQQDYNTTANLSINSLAKAYNTVPDLINPRLELALAVDIDWKAGLVIDVPIGDMRAMKRYIVFLPVFVWAIFFAGAEVKVENASIHRSGDSIRVSFKILVPSGTVASDYVQRLIPVIENGVDSLALDEIEIIGKRKQKLRRREAVLSGKTYEVPFYQTVDGGELQYDCVLPYEKWMGRAPVDLSLLCEREGCCKVEPLPGIFLCSDVKLRPPYVPSVQPVALIPSVAERLAEVEKVLFPMAEYEPYSDSMTVWRDRGALKVYFPLDKSDLRRDYRNNDVTLGRIVDILRQIYADDRSDVGKILIVGFASPEGPLGRNTRLAGTRAEVLKEYVNSYLELPDSLYEVANGGEAWGELRDRVEESTFDCRDEMLDIIDHTADLGRREWLLRRLDGGEPFKELLRSVFSDQRNSGYMRVYYTSEPDYNAIKINQAQGMIAEGDFDGAVSLLRPIREDKRCLNTLATAYYRLGDKATALDLFKQAAAMGDKVAIQNLENIENDYMKRILNIIIIILLSAICLTGTAQKIAVKSNLLGWATATPTLGAEIGLDDRWTLNTHIYYNPFTFRDNRKWKHIRVQPEVRYWLCQKFNGHFFGLHVLYTHFNAGQVPLPFGIFPDVKKYRYQGNTYGAGLSYGYQWILTPRWSIEGSIGVGYKYNTFDYYQCRTCGRKIGDGHKGYLAPTEXXXXXXXXXXXXXXXNLHLLGMKLIKNDKLECQIADVAEVAGYLWQRGWAERNGGNISVNVTDLLTDEEKALPAISERYPLPKVMNALKGNFFLVTGTNRRMRYVASHPMENMAVIRISDTGDWYEIIADNPVRPTSELPSHLSMHDYLKGRGVDNKVVLHTHPTDLVAMTHNRSFLQPDVLGKLLWSMIPETRVIVPKGLGIVPYKLPGSLELADATIRLLDRYDVVMWEKHGALAVGGDVIECFDMIDTLSKSAQIYLQARAMGFEPEGLTDEQSEELRKAFRLVMDILIGLLIIAVGSFGQSSSYVPIKKVKSWSWESFWLVQGIFAWLVFPLLGAFLAVPTGHSLGELYSEGIPFMSVLYGVLWGVGGLTFGLSMRYLGVALGQSISLGTCAAFGTLLPALFAGTNLFRGEGLVLLPGVCITLAGIAVIGYAGSLKARNMSDEEKQKAIRDFAFTKGISVALLAGMMSACFSLGLEAGAEVQQTALALGASDLFALNPVILLVTLGGFCTNAAYCLWQNIKNRTGREYFSVSVSTGVNNLLFCALAGLLWYSQFFGLGMGKSFFTGSPVMLAFSWSILMSLNVIFSNVWGILLKEWNGVGRRTVTVLIAGLLILIFSTVFPNLVNSNLMKNEQAVKAAFEYAAERYAAIGVDVNEVLKKMQGISLSLHCWQTDDVSGFENPDGELTGGIQATGNYPGKARNIDEVRADLLKVKSLLPGSHRINLHEVYGDFGGKKVDRDEVTPDHFTSWMQWAKENGLKLDFNSTSFSHPKSGMLTLANPDDSIREFWVEHTRRCRWIADEMGKYQNDPCIMNLWIHDGSKDTTVNRLYYRQLLEQSLDRIFATEYRHMKDCIEAKLFGIGAESYTVGSYDFYLGYGVKHNKIVTLDTGHFHLTESIADKISSLLLFTPEIMLHVSRPIRWDSDHVTIMNDDTLDLAHEVVRCDALSRVHIGLDYFDASINRIGAYVIGSRATQKCFLQALLEPLALLRKYEAEGRFFERLALLEECKSLPWNAVWDYFCLTNDVPVGEDYIADIEAYEKNVTSKRQMKDTACIAIDLGATSGRVILAKMKHGGLEMEILNRFPNVIKEIDGRCYWDIYSLFNSIKEGLNMAASRQIAIDSIGVDTWGVDFVCVRPDGSFVSLPRAYRDPYTEGVPEQYFRHIPREEVYRLTGIQFMNFNSLFQLYAMRLEGSIDIDGVRSILFMPDAISYLLTGKEVCEYTILSTSQLMNPETCRIEERLLEPLHIPVEKFPPVVMPGRIIGNLRADVAAEIGLSAIPVVAVAGHDTASAVAAVPASGRNFAYLSSGTWSLMGIESEKPIVTDEAYRMNFTNEGGIDGTTRFLKNITGLWLLEQCLKVWKNKSGVTYSYPQIVEMAQSVATNESYVDPDDATFSNPVSMPEAIADYCKSHHMAVPRTHAEYVRCIFESLALKYRFVLTRLQTVASFPIECLHIIGGGSQNDLLNRFTANAIGLPVIAGPSEATALGNVLVQLRALGVVADRDSMRRLAAGAVSLQRYEPCDTELWNEKYVIFKKKCNLLMNMEEKKSDALKYLRVNARDEEWGIVITTVGYQYVSPNHAYPLSKHPDNYNFKNEGKRTLNEYQLVYITRGEGYFSSRSCPKTHIEAGTMLLLFPGEWHKYYPDARTGWDEHWVGFRGFHIDNRVKSGFFTPSHCLFKIGTDDKIIDLYHEIMDKAEREKAGFQQIVSSIVLHLLGSVYYKDLNRSFNDDHMIDIINRARIMMKEEQTGNLSPETIAARLGVGYSLFRREFKRYSGISPGQYQQQLKLARAKELLSSSNLSIAEIAFELNFECVGQFSTFFRKKEGVTPSEFRRQRFMKKTFAYALLILTALYSCEEGKQEEPVLPGTTPDEIYLNVSPHTLTFDETDASKNIITVSTNTNWKATVDNSGLKINRTEGTSEDTSISITEAPEGKTCKLTISTIPANGEKTISKEVSISRAAAVVTPDRTIIYNNDFDKEIAVKNTYWPYLDQFDGWKNANGTGSGAETYDQMSVSVRSDWTSDYAPPADYRPYASGKNNIYFNKAGSFVSINNINIAQEKNFILQFGSSENKTFDYDDLKVEIGNGTSWVEIDYSRNLTNSWALTTSMFSLQNSSGTLSIRFTATGATQMRIDDIRLTDGEPSEQIIVFDNTVYPLAELPAYENDDYVVTHYGTLGSHRVRNYTMLFDKEKHAALWVAYPLHSCYRGNSGRTEAWAADPLIEMLYQAKVYGETFCYYKDYSRGHQIPSADRTATDELNSQTFYASNMTPQNGDFNGGIWASLEGKIRENMCQDTLYVVTGCYFGNGYTTTYDGYYGNNADPASKICPVPTHYFKVVLRTRSGNSGKAVGQCGSDELKAIGFWLEHRNDYPQTFSTEYCKSVEYIEQQTGFTFFPSVPKEVKKQCTPSDWVLMVLHENKDCRWYSFPSFDALPGVVTFVTTRNGVVHGDVYSTDNMGEYTGDNPDRVIANRQRLCRSLGIDTLISPRQIHGTKVLSITDEFIRLSKPEQTACLDGVDAVMTDCPSVAIAVSTADCVPVLLYDAVHRACAAVHAGWRGMAGHIVQRSIDEMVNMYGTVPSDLYVAVGPSIGPDNFEVGDEVVQTFDSEGFDVNRIAHHYPSGRFHIDLWAAAVEELTVCGVDLSRIEVAGICTRAHDWEFFSARSLGFHSGRFLTGIYICPMAESNFVDYVKILCRSGKGGAGAMHLYRAKYVPKGGPDGGDGGRGGNVYLRANRNLWTLLHLKYSRHVLAGNGSPGGANRSFGKDGEDKTIEVPCGTAVFDANTGEFLCEVTQDGEEVVLLKGGRGGLGNWHFKSATNQTPRYAQPGEPAVERTVILELKLLADIGLVGFPNAGKSTLLSTISAARPKIADYPFTTLEPNLGIVSYRDNRSFVMADIPGIIEGASEGKGLGLRFLRHVERNAVLLFMVPADTDSIRKEYDILLRELTAFNPDLQDKQRVLAVTKCDMLDDELIEAMKDDLPDVPVVFISSVTGQGITELKDVLWRELNDEENRVMTLTHRNLDERHRVEEEDNFDTGLERDESGDEPGDDNFEEEDWMKKIVTLFVAIAAFCGFASKAEEATTFEVNRIKYTVTGENSVGVSGLNENYEPGEVKLTEVIIPSTVENAGKNYTVTSVEEYAFRWTSGILKIELPNTVTELKNNAIYYNDDLEEIVLSENITKLGEYSLASNRKLKSLAIPAGVTEIPQSCFASDEGLTSITFASDFTSIGNGAFYKAGMAEITIPGSCKTIGNNAFQLCPNLSKVTLGEGVETLNEGAFRECAKLTEINLPASLKTIGQYAFLNDVMLSSVRIPVGVTEIGNAAFSNVGVTAFEVETGNTACQAINGVLYSAEGNILLAYPLNATATEYTIADGCLGVGEGAFAHTTLQKVIVPEGMRAFDDNAFSESSLAEINFPESLVLFGNQAFAKTQLTTVVLPENMTNVYEGTFAQSTKLQSLTIPSGIRTIESYAFNGCTALTEIHCLGAEPATLNYYEGYDHPFNGIDASQVKVYVPKGFKSAYESSEWGYQFDNIIESNTGIFLQESTNPANDAEMESIGTIEITFPENASLVEQFPSVKVVKGQELYGEPVENAGGWMAFASGKKVNVFPADEYQEGPQPIPMEDGVDYYVTIPAGIVKNAEGSLNQKIVLHFVGKIESGVDQIESNDCFVTNNNGTLNIVLGNLTDCTVELFNATGNLINSISHAQGTATLHVESNGLYIIRIVSGDTIKTFKIVKMEERIKDRVDCNKIRRYFIRNKRAENVWFTQLIYKIDDFTTFCVIPYSHGWKEFQKMGNHPYVQVYLLYRNSKGYMLLTRGGVLDNEYAFFTSHLFDRYRERELYDVSLDKKEVIKEFFKNNGNICSIPFPTEKLTNNHLGITEKGILFGERISDTIMLYKTYIRKDQLQEMQFEAAMQVEEGLGILLKYRDQIEKFIYQNPHLLQRINYYMLNVVIFGAPGSGKGTQSERIIEEYGLFHISTGDVLREQIARGTELGKTADSYISKGQLIPDELMVDILAHVLDSHEESKKGVIFDGFPRTIAQAEALTRMLAERNAQVDVVLGLEVEEKELIDRLLKRGQVSGRSDDNLETIQKRLDVYHNQTKPLKDFYQKEKKYRAIQGMGSVDDIFKSIKSVISELMNTKIQIKDRFFTPYISRDEIAAAVGRIASKMNQDLAGKNPLFLCVLNGAFVFAADLFREMTIDSEISFIRMKSYEGMHSTGEVKQIYGLQQDITGRTVVVVEDIVDTGFTIQQLLQQLNSHNPKEIKVATLLFKPDSLKCDVKPDYVALEIPPAFIVGYGLDYDEQGRNLKDIYVVSEMETIIYIFTESPPDHHSPRQNVPFPFFSLYLQIRCGSTSQVGNIISACLCTHLLLYLTLSKDSIEMKIFTTQSTKLLDRLTIEYEPVSSIDLMERAAEALTSEICNTISPSQRIYIFAGPGNNGGDALATARLLIDRGYKPVVYLFNTMPNHRLSADCEQNRERLRRTGHNDFFEITNQFTPPVVNSGDCVIDGLFGAGLKEPLTGGFASLVRYINESGAFVISIDIPSGLFGEWNPEASEDRIVKARLTLSFQMPKLAFFFAENAKFTGETKILDIRLHPRAIAETETCYYLTTAENIARNIRHSRPKFSDKRDYGHLLLAAGQYAMMGAAVLSAKAALHSGVGLVSVHSPRCANLILQTAVPEAIFSPDKGENHIEEIPVHPRYSAIAIGPGMGCNETSVSALMHLVKEIRQPLVLDADALNCIAREQSLLRYLPSHTILTPHIHELERMFGPMTDDASRLKCITHVATKYDIIVVLKGANTAIALPDGTIHFNSTGNPGMATAGSGDVLTGIIGSLLSQGYSPEDAAIIGVYLHGVAGDIAARESGEEYITASDIINHLGLAFKQIKSYQVMKYFILTLGLFLTTNIGFAQETKRLTAEKHNEYGLIYSLPQTHLDIEVVATKTTRKAGPYYQYAEKYLGIPGAITQDSEEWALSSVKVTPYGVPDPEEQYLMQFKPGGNGYIVLDENGLLLSINTEPVIDSIVSTAPKQKQESPLDNNEYAKVYSEELLMSASTVKMAEVAAKQLYRIRESRLNLVTGEVDELPADGESFKLIIQQLDEQEAALTALFMGTTQTETIIKHFDYIPVEEVTNDIVFRISDLYGIVKPENLSGAPVYLSLKITEEGELPIDNKGNIKKMPKNAVAYAIPGKAEVILSDGKKTLFKENLPIAQFGVVFGLDPSIFTDKKAPSCATFYPQTGAIRQIGKMLLPYMKSGLAEAGCDEAGRGCLAGSVYAAAVILPPHFRNELLNDSKQLSEKQRYELRPIIEQEAVAWAIGIVTPEEIDRINILNASFLAMHRAIEQLNPQPQHLLIDGNRFKPYPDIPHTCVVKGDGKYEAIAAASILAKTYRDDYMNRLHEQYPMYDWNRNKGYPTKVHRAAIRQYGPTPYHRMSFQLLERQLSIFMEKIYALISLCFCVVSSLQAQTTIYAYRNWQQSNPVNVQKGPVKFSSDNLGVVELIADQSTLGAVYAGTYFNYKWYAQVTKPGTQSSLEGLYTVDMNDGTRTLISTNGVHLVEMTYDYTTNTMYGIKNGAEYLMTLDLNTGETKQIGAFQTSTMSVYMLALACHVDGTMYGISTDDNLYRIDKATAACTLIGATGVNAAFTQSMDFDRNTGILYWLNCGDYKLYTVDITTGAATVIGGVGKNGDDSMASMFIPYIHVPVGAPDRVLDRKVVASGNSAILSWRNPSFDAQGKALTELTGIKIYRGEELVTTVTVSSDKTGQSMEYTDENLQDGLYSYRFVPVNSKGDGGVDSDDVSTYVGENAPGKVVDFVVKQGDNEAILTWKAPGEGMYGGTFDPGSITKYVITRSNGSASNEIEISDPSATSYTDTPGFGTYTYSIYAVNDMGNGAVSIAAPIIVKPADWIVMTNGEAIVESGKTYHFYDAAGPNAYYPNTRNDTLTIRPQNSNGLVHVSFKQFVTDTYGDYLYIFDGADTNAPLIGEFTSTSVPSALVSLESTSIDGALTFVFYSDVMSRDEGWEADVTVTEKKTHDLMAVSLKGDLYPGAESETIYAFTIRNKGVDKVAATDYKVKLLDAAGSVLAEMDGVEIGTMQSIVFDMKFTSSESGDIKIHAEIEYAGDDDKTNNSSEELSVSVLEEGSQFISIGDHDEEISVLPVSFMTGESIGETIYYKDEVGLKSGTLQMISYRFSSVGTSYSNIPVKIWVGETELEDLSETSIPADEMTLVFDGTASVTPGDEEWIFQLTTPYSYKGGNLVILILKGNPGSTSYDISFKGTYGFYDSDPQRSRFYSAFDDSEVLDPNAVPIGYSGSTMWPDVKMLFTDASSGITKVVDDLSVRIYPNPVSDILYVEGVDIQKIEIFDGTGRQVYVSDNLFTVDMSSYPTGIYYLRVVTDQGKVSTKKIMKRMLRLIHYISVFSLFILLFSCAGRVVEADKASTYFEKGVAFEDKNMFDSAAVYYLSAISSLDSSRISDFDALGAYYNRIALLLFKSNINEEAEKMFRKAITFNSMLSDKSQLSESYRGLWKCYYVDKEGGIDTTLLKTIELIPQIESEEELYKTKNALSYYFLISGDYASAMKYNSEIRPLCRDSVLFYKSCLVRGSIFCGERNIDSAIYYTKKAARSNYIYTKTSAYENLYAMTGDSVYLGLYHSLCDSIAGMVKPAKVNSAFYGELINNMNVEYSRRIHDRTLLSIVCTAVVVVLVSIFLFYFFRRKIIPNKQHIEVEEENNRETSTEIEKRTEALQREIVERIGEITAQKNKRFVKSEFFKEVTEYIEGGNVFLTISLRDRLFKSLRQEYALLYQLLTAYFSFSDEEFYFFCLSSLGLNTKECAACRSVSVSAIRVLRKRINDKMHKYITVEELFQEIKLMFKGHPKGLIAAALANMGERFGYYIMNAVLVLFLCSKFGLSEETSGTIYSFFYAGIYLLALVGGAIADRTQNYKGTIRTGLIIMATGYVLLSIPILATSTNIAWLLPLTCFALFMIAFGNGLFKGNLQAIVGQLYDDFEAEAAKQGHEALKIAKSKRDSGFQIFYVFINVGGLIAPFIAPLLREWWLGANGMAYNAQLPALCHEFINNGTQMSQAALDNLNALMTAAGGNVAELTSACQNYLQIFNEGIHYSFIASVVAMVISLIIFVAYQRRFPTPGKKTKVESQSYTAEEKRAMAKEIKQRMAALFAVLGIVIFFWFSFHQNGMSLSFFARDFVDSSAVAPEIWQAINPFFVITLTPIVMALFAWLSRRGKEISTPRKIAIGMFIAGLAFLFLVIYSVLKGYPSADDFKLLPVAEQMSQKAHWWVLIVTYFFLTVAELFISPLGLSFVSKVAPKHLLGLCQGLWLGATALGNLLLWIGPLMYNAWPIWQCWAVFFAVCLISMGVMLGMLKWLERVAEMKSIDEIQDEIIEEFSVFDDWMDKYALLIDLGNALPTLDEKYKTPENLIEGCQSRVWLQADYREGSVYFEAESDAIIVKGIVSLLVRVLSGHTPDEILNAHLYFIDRIGLNEHLSPTRSNGLVAMVKQMRMYALAFKVKNNMKTVNRKAGYLILIVGLVACSAKSVKNSEEKDTDSVSIEVPSFDTDSAYAYIERQVQFGFRVPNTPAHLATADYLSSELARHGAVVEVQQGTVTAYDGTELSIRNIIGSFSPEKKNRILLFAHWDSRPYADNDPDKSKHRQPIAGADDGASGVGVLLEIARQIGKRQPDTGVDIAFFDAEDYGVPYWSESSDENTWALGTQYWTRRPHKPGYRARFGILLDMVGGAGAQFRRELFSKYYASGIVAQVWDTAKRLGYGNYFIEEDGGYVTDDHLYVNRYGIPSIDIIPCHRDTETGFPPYWHTVDDTMRNIDRSTLKAVGQTVLTVLYEEMMYRPQFLCPGDSVSIVSPASIINPDYVKGATGVLESWSLGVTVSSHCLDHSGVYSGTIDERMNDFRHALYDPAVKAVLCSRGGYGAVHLLDGLTDDIARNPKWVIGFSDISALHALCVSRGVMSLHAPMCKHLTTEPADNRCTHYLRQILFGEIPEYKENPHPLNRCGEGRGMLVGGNMAVLCGLISTPYDIFLPGTVLFIEDIAEPPYKIERMLYNLKLSGRLASLSGLIVGRFTEYTENEGLGGTLYELIRKMVDEYDYPVCFDFPVGHVSDNLPMIEGADVVFSVGERSVDLSFCIKMVINYEEYFEQAGLVDIQTAIPDVVVDLKYATADNFMGEILYPDLRKAYLLPHMISRLARVHARLQELKPGYRLVIYDAARPLSIQRRMFERVRGTPQEQYVANPYNEGGFHNYGMAVDLSILGSDGVALDMGSPYDFFGEEAHTVDDDYLLKTGRISEAAYHNRRFLYAVMREQELYPLPNEWWHYQHYVQESDKKRFKILDFMEDKGESKFRNVMERYWYALFIIAVALAAAVIGFICEAWKMQEGFLYDLLTSIISTTIAFFLFTLTYQLLTKRTSAQSIVEEIKPLLDRQQQRVKEEFRNEVDDSIVKSLGAELDIIQKYDSKEVIDVVNNCSERLLGSLLAKNMQGVFSSILKNPSYRDDMVYDIQIIPNRKDELYDEAGQYMRCKDAGFCISQSLRYKKYLKKGTENKLTKFSCFFAFNENPFFQKEQGEVFFLREELSCLSFIESLNVENAVSLLNYSVEFYLGNVPICVRDIEVELVKLENSATIGIKLTSDIPDRVLCIDGEYVYFDAKIKCSYPTLRREFYFKVPELTRHADVSISLPSSKEELHLVSFTDNYRIESYGHNRYSFRHGENNNEILLPNNGFTAVWMGNIVAIVGRPNVGKSTLFNRLTQTRKAIVNEEAGTTRDRQYGKVEWCGQEFSVIDTGGWVVNSEDIFEEEINKQVALAIEEADVILFMVDVKTGAVDLDDHVAAILRRSDKPVILVANKADSNEWQYNAAEFYSFGLGDPFCVSAASGSGTGDLLDEILKRFTKKSEPEIEENIPRFAVVGRPNAGKSSIINAFIGEDRYIVTDIAGTTRDSIYTRYDKFGFNFYLVDTAGIRKKGKVTEDLEYYSVIRSIRAIEASDVCILMIDATRGIEGQDLNIFSLIQKNKKGLVVCVNKWDLVEDKSNKAIQTFENAIRARLAPFVDFPIVYASALTKQRIYKVLENAVQVYKNRHTKIPTSKLNEVLLSAIENYPPPAHKGKYVKIKYVTMLRETYVPTFVFFCNLPQWVKDPYKRYLENKIRENWNFSGTPINIFMREKMHKAGFVNIVGNPNVGKSTLMNSLVGERISIITSKAQTTRHRIMGIVNTEDMQIVYSDTPGVLVPNYKLQESMLNFSQSALLDADILLYVTDVVEAPAKNQSFLDKVARETVPVLVVINKVDLLKEQSVLETLVEEWKQLLPNAEIIPVSAQYKFNLDYLLKRIQELLPPSPPFFEKDALTDKPARFFVTEIIREKILQTYDKEIPYACEVAVEQFHEEENRIHIMAVIYVERDSQKGIVIGKGGSALKKVGTLARKDIEVFFDKKVFLELYVKVEKDWRSRENKLKGFGYIPEMAKEMRLFLFSNKSDYRLFRWVEYFHYFCIQKLLTCNRIKQNYAMQNAKITGIASYVPDYVLTNDELSHMVDTNDEWITTRVGIKERRILKGEGTGSSDLGVKAVAELLKKTGVKPSEVDLLICATSNPDYRFPSTASIVLEKLGIKTAYGYDIQAACAGFIVALQAGTAYIKSGLYKHVVVLAAEKMSSMVNYKDRSTCPLFGDAAACVMLEPTDEEVGVKDAVLHTDGMGLPHLLMKAGGAVHPASHETVDHDEHFVYQEGRAVYKHAVTDMLTSSESVMARNGLSVDTIDYFIPHQANLRIIEAIADRIKLPEEKLLVNIQKYGNTSASSIPLCMAEFEHKFKKGDKLVLTAFGAGFTWGALYLIWGYDAKMAHPKRKQSKTRTAKRRTHDKAVAPTLAVCPNCGAWHVYHTVCGECGYYRGKLAIEKEAAVMPIGTQDFEYVLDNEFFKNIEGEDVQKGKVKVKLTVKRTAASFELDFDLEGVIQIPCDRCLDDMDHEVKTQETLYVKFGSEYSEESDNVVVIPESDGELNIAWFLYEFIALTIPLKHVHQAGKCNKSMSAKLRKHAARSMDDSDESEDAASYDDEDVVDEVPGEGEETDPRWDELKKIIDNNMQNIYDARQKGKLIFLLISVLLVGGVLYVSNDLVEDLSIEERKKMEIWAEATRELASDKTEMSMELILKVIQSNTSIPAIIVDDTGEINQYLNLNLPETDTEKYLQEKLEQLKSKSNLIEINLGDGEKQYLYYDDSILLKRLSFYPYVQLGVMVLFVLIVYFALISTKKAEQNKVWVGLSKETAHQLGTPISSLMAWMDLLESSGVDPSLLSDMNKDVNRLSVIAERFSKIGSKPEMELIYVNEVLENATEYMRRRVSDKVLITTHLPSDAEGAMVCLSLFEWVIENLCKNAVDAMNGEGRIDVYMTSEKQQIYIDIKDTGKGIARKNFKTVFNPGYTTKKRGWGLGLTLAKRIIEDYHAGRIYVKDSEVGKGTTFRIELKRVVMKLSSTKLKVFGGWIVVLMCIMVFSSKVLGSESIPKERENYQFTERSVPLKSGKAQVRKYRKRSSRNPVGIINISKLPARTRVAKINAQNSPANLFGFLAATNSYEERDYGIYSINPNTGDYSKLYDVEEYGEGEGGGTYANGKFYLSVFDEFYWSGINSAKLVVVDVVTGDKQVIEKEAEYPNAAVNMTYDPVNDVVYSINYDEAGEAYTLSKLDLQTLDFTVVAPMENSYRGMCIDGEGQMYVIDDYGDVYKFDKESAVQGEKVVSTGFFPEYSQSCCWSPLDRKIYWAACNWSESELIVIDPVSKEFYTQLTFDNGEEWIGLYTTDPFSDPSAPAAAENLSISYATPGATTARISCDLPTKTAGGNELKGLVNVAIVVDGDTVQIKENQSPGAEFSISLALTNGLHVLKVICLNSGGEGVAASIKTFTGEDMPQIPTEVTAVAEESGKVTLSWTLPEAGINGGWVNLTKVSYDILRNGESLSTDIKETTYIDNLPENELKSYKYTVIVKFGGEECGSVESNSVVFGKAVSLPYEQTFEDASSFDLLNIIDNNGDGVTWQFDTGQFSAGYTFSADNAADDYLVLPKMTFKAYNVYQLSFDICSGSGYNAEIIGVKVGAEPSVESLSTIVMEPTEIMADASSPRHIVLTYVPEANGQGNFAIHCTSVADRFGVNVDNIRVEEFGSIYAPKGVTDFVVTADQAGLQKATMSFVVPKENYQGEPLSSVSKIEILRNGKLIKTFENPVLGATLTYEDEHSDFGFNTYSVVAYSGENAGVKVEQTVFCGIYSLPYMVAPTQQEFSLFTIKDNNNDDNTWYYDISDGSLKYAYCSNSADDYVITPAIELGTAHMIEVVFDAKAGVMGSEKLEVTYGKSDKPEDQQKAQTFDLTNKEYQTFTATFEVTEHGRYYVGFHAISDPDQFTLNIKNIEVRNGSLMKAPAAVTELKATPAAQGGLSATLSFRLPTQSLNGEELTGTVDVTVKRVDGFVVAEFTGKQPGEVLSCNDENAVQGNNVYTVVAKNEFSEGGTATVKCYCGIDVPSIVSNFTALPSSDNLKAELSWSVPTVGVHNGYFQPSDITYKIYEYVGTSYREVGTTTALSYTATPSSSKLDSYTFLVSATTIGGEGEAALDNVVLGIPYTMPFEENGVNNMTTTYPWIMGALSGQAEWGLTNYIRSLGLEPEDGGMFVCHSQSGKGEARLQVPKLNLGGFNAPTLTFLLYRYQNAAGKLSVKVTADDKAYTEVYSANTASFLPGWTVCKVNLAQYKDYPWIAIVFDGAVSNGSDYVIIDNMAVANESEFDAKLESIKGVRRPVVGESENYTVVVKNNGKQSITYDVNLYVDETLVQTLSRTEALAQGETADHLFTVTPTAEMIGKETPIKAEVIAKESDEIPENNILEAIIIASQSELPVITDLVGEKTEKAHELSWTKPTLTPEPMVDDFEGYESFIYENIGDYTVVDGDGLTSAGILFVEFPNMGTPMAFQVWEPLAEGVDVTSNNWKPHSGEKCLVSWAGLSYDGLTPQNDDYLISPEIIGGTNVSFYATIPTTEYTPETFEVLYSTTTTDVDAFELLATESVLNVGWKEYSYQLPENARYFAIHYISSNKFALLVDDLSYVPVSAVKDLSVVGYHVYCNGQKLTQTPIVETNYSTPSIEYGAYHVTVVYDKGESFRSNTVRLGTSAVDELNRNDIRVYGMNGCIMAEGVTGRKISVYGIDGRTLFYIESESDTEKIPMERGVYLVKVDNRTIRVQVRMKVNIFKCLTLSLLLCSIQLLYAGRIYDEFEDTYKITWIGNSKLISGTTDDWAQRAGDIYRLKIDDPSNYSFLVYELPENEIAHEIIVDYYSPTGLRPTLAVKNSAGEETKYVEGWDNGYPEITDKGHGLYQCTLKDSLIPEDATQVVIYLDAQSDIELLRNIVYYGDGYQAKNYNEKTNYYRVQKLLEKAESGNDITIGVIGGSMTAGANAEPMETNCYGARLKTWFESTFGIDVNFINIGIGSTNSYFGCIRAEEKLLRFNPDLIIIEYACNDQLEDIYLDSYESLIRKCWKNPGEPAVISLMLCTQAGISKIERQYPIAQHCQIPIVSYNDAIKDEIIKGEKTWLDYYQTSTLIGGDGIHPNTTAHQKIADLIATELLEGKKASNIDRMASLPAPLYSNILEDAFYLSETDITPVQTGVWTAGGSIWDFGTGKGWRSEIANSELQFKINGDVAAVTYWKRPANENFGTAQIWVDDNPAVVIDGSNGEHIDQIVLTDLGIGEHILHIKLLENKKFEIVCIAVSGERSYWNGRYYLENVANNLRLTISNNDITMNPNGTGFNVSHTDDGYIAFNENNSYLSVNAATGALELSSNLDTASKFLYIDKGEKAAIRALANGKYLSQKDNIITASTSDIADNEYFLFKNEGDPTTINELRNNEIDCSVVSNQIIIKNAIGEQVNIFDLSGKLLYRQNISTNNENIYFNNGNYLIQIGDKTFKCNIMMTAKENVIRTLRHDNPEWIPVNLWQLPAAKLKYGQALDDIINRCEIDILSAPFDDPTEDARHYQIGSYTDCWGSTWVNHQAGIIGEVKEYPFADFNKVWNYESPKKLFLSGISGFEKTKAFIDTHKDKFILGGWISLFERMQYLRGTENLFMDTLIESPEYFKLMEIVEDFYNTYLDEWLKLEVDGIIFGDDWGSQRSLLISPETWRKQYKPLYKRFFDKVHTAGKFVFMHSDGYILELYDDLIEIGVDAINSQVWCMGLDKVSEKCNGRITNWGEICRQHILPEGSVEDVIDAVHKMKEALWVNGGLIGQFEAGPDMPLENIKAGLTHWNDMEQFQPNANNILDVLYNKKPKYLPLYEHHIDIEFIEKFTGEELIGYRETEPEYFFKKVTEFWKNNTYDAFDFEAPICDVFPEHGAIMGGKLGPIQTRSDFERYPFDEIPHLFWEANKPKLDAIRKVLPTGMKAYGGCGYGIFESAQDLVGYENLCIMQYIDPDLFRDLFIRIGDLYVELWSKMIQEYSDIFIFFRMGDDLGHRTSTMLEPTTIINHILPQTKRIIDLVHHAEKKFLLHSCGNIFEIMPDIITLGIDAKHSNEDQIAPFDEWIKRYNGQIGLFGGFDVNLLSLGTYQSVYDEVLRKGTEYRRICKGYGLGSGNSIASYVSVDGFRGMIDAVKQIRRKEKMKRKFILLTLVIATLIVPANLQAFESTVEEELQTPWEGFGYNQWGFARESDGNTFKPWSDDLWKTTTERILAIKPSLVRLPVIRDWFNKDDDGNNLPIGTYNWDSKYMQAYFKIMDLYKEHDIKVMSGFWGVGYNGEDYKQFYTTDECAQLQADLIEYLFRTKGYDKIITSYAPSNEPLGVGISYEDWSTMIKKLYTELEKRGLPTNFLSGADSWSDWIWKPAQYNADQLSAYDFHNYLNDTPDDTYNQLYNRTIETTFANYLANVYKYDNFNKPVHVSEMAPIGVPFIDWPVADAPAHCRIDTYEYALGFWDYGIQLARSGMASGLAWAIDGLEQNKNAGMWNNAGTYGGMTLRPWYYTWQLMCRYFPRGAKILKMTELEGRKDIRILGARIGSEDYSFVAVNRRMDAQSKTQSITFKVDCTKPLYIYRFNRNSCGDGAALSLPYEKITDQNLSTGITVEVPMEEGIFITTLEPLETNTSETQSTLTIDFESQDGYMLLGDYNKGIRTYVGSNPRKRDPNTSDNAGYSEILINDEYNPRDCFSTIFPLNKILISEDFPLLNIQLYRSRPAKIAIALHIQNEDRLLGYEFEIPHREWEELQLNLTPLIGKTLDYIIIYPYRDSATTSTLDTESLIFDNIFLSNTENSPIDLQEITTNNDQQYRQILDIDFEYLNSFVKVIPANSSIMSSIASNPKIQENNPSDKACQINILTNDAGQDLSAQLNLYPFVQVPESNHNLFFSYYRPTGQSEIKIVVNFLSGEKAVGHFSCNEKREWFRYGLNLSNHVGQIITSIDIYPNLNYSDRLNVLDTSFFDNFIFSAEEVSGIEYVTNNDISVTAENGYIYIEGVKNMPVYLFSVDGKLLHFAENVNGSYSIPAENGVHLIKIGNTSYKIINFMAKLSDLHNAIVKGNLELAVSTTQEALQENIDPQTLISDYLIKGMEEIGTQFEAGKAYVPNLLMSARAMKGALELLKPYMENDKNTISLGKVVIGTVKGDLHDIGKNLVSSMLEGCGFEVINLGVDVSDEKFVEAAKEHKANIVCMSALLTTTMVYMKEVIKAFEKAGIRNDVKIMIGGAPLSEKFAEEIGADGYSDNANAAVTLARKLLNKMEHSLRFEELNLTKETVYIEMGYGAVSPDKNVRDLVDNLFLVANNIVRLRFYFRMFDGYVNKDCICCNQKIFHVNQTIATLLKNSERFVFFAATAGMEYQDFHNKLSNADDALLLFIWDILGSCIAEATGDIMEKFVETELPGIPHTNRFSPGYCGWHVNEQKLLFSLLPDNVCGITLNSSALMYPIKSISGVIGSGLHVDTRKYGCQFCELDNCYKKRIKKSFNHETQSQSEMKLNLNRNKRYAIPIMTHPGIELIEKTVKAAVTDGQTHADAIIALSENTPSDAATVIMDLTVEAEAFGAKLHFSENDVPSVAERLLHDRNEVENLRIPDTDTARIPEYLKANRLAAERINDRPVFAGCIGPYSLAGRLYDMSEMMMAIYVEPDLAKILLSKCSEFILKYIRALKETGVDGIIMAEPAAGLLSNDDATIFSTNYIKPIVEAVQDENFLFVLHNCGNTGHCTQSMIDSGARALHFGNQCDIVSALQQVPSDRIVMGNLDPVGIFKSSSPKQVYDETERLLHVTTDFDNFIISTGCDVPPGVSLENINAFYQAVEIFRNRHMKRLIYLILLLFGLSGCKTEQQEVQNPIVVDTDFVLQENYYGGAMQWEPNDRDSMTEAQWDRLFRRVEFMKLGYIRCCIMPYFYCFGYDGNDPILLWDMDSTKVDARWYANSRRFMNDLYCQLQFCKDNDIDVLLGEWWKPMNPNWKQAVPVDMPKYTIELDDSRYAVQVAELVEYLVKEKGMTCIKQFNLGNEVNLVANDPRTGYSWEKWKKAILNLRSELDKRGLNNIEIVGPDGGYWGTDVWFNKTLTELDSVVPVIDYHWYINKDWTFTNRVEDETRMFRFFTQMQDSSKVNIWGEMGIRDGHNEVLDQHTLIHQWWYGTFVADALIQTLRSGWSAAAAWGMDDAMHYKDDLDEQKRWGFWNSIAEQKNKPEEANIRLWFYTWSLMSRNIPKGSKILYSNSYRTQNLNGVAALTPTGDLTFAITNTADFAQRVTVQIPTVVNDPIINKYVYFEDDYPVDTAGFPVVKEVLKDVNLQKGIVIDFPAKGFVLLTTIGGSKPEIVKNDKYMMDPMEGVQRMYDHSNNLGLNGFPKFYDECNTAAPDFQFFKVLEDCGTIHPSTNEEHAYITYKFDGFNYFEIKVSGVETITDRFKVYVSPDNCEWREVELSFTEPEMSVWRFVHSTITPKTELDNCNYLKIEMLPNGYFSNTRIREVKIEKRMKLRWRILYILLGSLFLLPSCTDEDLDTTMYGGREDTEFYNNLEEINQALTACYFYMKDSWNDMSLELMFINDCASDDCEKGGSGLTDKRNIYQLETFNIFTTNSKVSQFWNMAYRAIYQINTLLDKSEIFRLENTDLTEDDKTLLTRYENEARWLRGVWYFNLAYLWGDVPLFLHAEQPADIYKPRTPVAQIWEQVIADFTAATALPKRSEYSEEDTGRVTSGAAYAMLGRTYWYNRDFENVYKMLYVLVEGEQKGEYELDPDFATQWLNPNSNLRESIFEIQYVTNGKNWDESTGWNGVWFIPSSDGGYGFHLPTQHLLDAFDPEDPRITWTFVRQGDQFVGNDFVTGDANYPSRFFDRKHFVPMSETLNAASPVYPQDVEMTVYVIRYADVLLMYAEACLEKGDIVGARKYLNQVRKRARESSPLDAKRVIQKYVPDTKPTSLPDITSDNVAEVRLAIWNERRFEFACEGIRRMDLMQQERYGEIMTAVYSNGYATEDVDKGRYYTKERELFPIPQNDIDLSRGALVQNPGYMKLWQFLSVILILSISPLEISGQNNSGIVSGSVFNSGQEPLVGVSVFVKGTNIGTMTDADGRFSVKAEDGQSLEFRYIGYDTKVVTVNGKTMSVTMSENQVILDDVVVIGYGTQKKSDLTGSLSSVKGEDIVKTGDTNITQSLQGKAPGVYVTSNSGTPGAGATIRIRGYGSISTDLTPLYVVDGQPMEESSVNTINPIDIENVEVLKDASATAIYGSRGANGVILITTKKGKSGKTSITFDASFGWSNAINRVHMMNSDQLYGFLEEAYENDGMRMPRNITRLYHLDGEGLGPVDEYGEPTDINVYDTDWWNETTQTAFKHSYNLSVSGGTDKLTSHFSIGYLNQEGIVMTSDYERITLRVNNEYKFNKWITIGQTLGAAYVKSHDLNTPINEILLPDPFSPIYAKNADKQDPNYEFNKYMGSQYSYYSNPVAKLNRQKKEHLNRNIDGTAYLNINLGLKGLDFKTMLGFELPEYTYTEFNPFFDLRPNDTPYNMCTNVESKFLLENSVANTSSTELNYTFQNTLSYNNQFGKHSISAVAGFTWEAYTGRSFTAERLNTPSNSDAFQIVGAGTKEGTSTGSRYENYLISYLGRINYNYADRYLATVSVRADGSSKFAPGNRWGTFPSFSLGWRIDQEEFYKDWNQNVLSAVKLRGGWGQIGNQNIPSFAYADVVSTYDTWVYGFNSGLNLLKAYASTSKGNKDIKWETVEQGNIGVDLGFFKNSLTLSADAYIKTTRDMLMQNPLPGMAGYPTTPWVNAGSVENRGLEFLIGYQGKVGDFRYSVSANFTFQKNKLVETGTNDPIWGTVSKNEIGEEFGRFYGYVYDGIFQSKEEVLAHVGADGKTLLQPLAEPGDARFRNLNGDNTLDSNDRDYIGNPNPDVIYGGNIELGYKGIDFALYFQGVAGNDIWVGTKALLRQTSITNLLAETYTDAWRNPGDKTDVFGITRKDDNDNYRNSSWYVQNGSFCKIKTVQIGYTFPKKIVEATKVFSSLRLYVSGENLFTFTKFKYMDPEVPNGNALNMGIENLGYPNPRTFTVGVNVQFMKKIFNLIAVGMVLASVNVNAQTYVNEMTQADVERDCYIEGGSALFNDAADAYYGDGSYVQKSSASTPTAFIFNRDIWGNKNLTGFIVNVLVPNDRMDFDQFIKIEYSTDELNYQEVPDMKVEKSYDAVLGNNYWIDVWYQGALPEGVKEIKVTMVANEEVANWIPCYRRTEIFYEGGDSYEYVKPPYLMIVPTEFSVDFETENYSIDMAGSQNASSTIEVVDNPKKDAVNGSDKVLKIVQDPTDPNWGWDNADWFGVAIGLLSGEEEQLTEITETDGRYLHFSILRNENSVFGMETWGGTCSYKNQEIPFTGSENWQEVVIDLEEYIGSTFKQFYFSPNEKFGTDNVAVAETTYLDNIYISDVATSSGIADNVVSTSKVWGGKGALYVEGEAGEMSVYSVSGMEIGKYALNGFLQIDIERGIYLVKIGDTTSKIVVYMELNISNIDIVVILLFVVGIIWWALKNRKNENASEYFLAGKSQNWFVVGSSLFAASVSSSTLMGHSGEGFISGIAVFNYNVGAIFVIIFVSLFFLPFYIKSGIYTIPEYLGRRFDNRSRKYFSFITIIGNVFLDAGAALYTGALILKIIFPEIDMMWIIIGMALMAGTYTIIGGLSSAINADMIQSIILIAGSVLLSIFCFNSVGGWENFVEHFHDGVWLNLIRPNSDTTVPWFSIFLSIPILGFYFWGNNQVIVQRVMSAKTVNEGRLGFLFVAFLYVFTLFIFIAPGMVGRMIDLFGVGDTLPNEIIDGNTLRAQYGIDTNEVYPRLILKLLPVGLIGVMIACMVSALTSTLSATLSSVSTLFTMDFYKSWRPESSPRHLVRVGQWTSFIALVVAVLWAPLIGKFASLVAYYQEFSSYLAPPIVGTFLVGLFWKGSTRNGAFAGLMSGLAMSALIMTYKFGFGGVVPFHFLLWVPILLILSVLVNIIVSKCDRNKETDVETYTWNKSVWQDDTRELKTVPWYKNFRYISIALIIIALLEYWWFFMKLKKYEGNPILSPNPENYWESLVVCNPGVIYDNGVFHMLYRAAGNDIEHLVYIGKAESTDGIHFKRVSKEPVFSPGKDSFDAGSNEDPRIVKMGSEFFVTYAFRPYFASQYWKNDYDQVEAPEHDPNAPKCLRENISNTALAVSRDMLHFKKVGRLTEPSLDDRDVILFPEKINGKYWMLHRPKDYVNANGNYGTDYPSIWIKSSDDLMMWNTESKLLMKGEEDWEVKIGGNTPPIKTNDGWFLLYHGVDANFTYRVGAALLDLNDPTRVLYRTKDFILEPETYEETQGLYRWGVVFPTGAVVKDNILYVYYGASDQWVNLATCDFKELIDFVKSNSRKKMKNIQHEITPINEDDLFIILNHPKADFDYPIHFHSDFELNLVLWDFGRRIVGDSIEPFEEVDLVLTGPNVPHKWEGNNVESNHVITIQFHEQLLTFPILQKRMFSSIKDMLEKSKRGIQFTENKNSDIVKRIIAMTQMTGFNVCLEFFALLYDLSTNPRQRILASGTFDNDSILRDSKSRRIAKINEYINNNYMNPIKLCDIAQLVSMSDSALSHFFKKRTNRNIVDYINDIRISNATKMLFETTNSISEIAFLCGFNNISNFNRIFKKNKGKTPSEYRESIQKIMIKYMEYIVNLNLSEYLLLFQILGVYLGVEFQTHPIMNIKRNIIFALESRKKNGVPIVENVPIRMRVIYASQRIEFTTGYRIDVAKWDSDKQRVKNGCTNKLKQSASEINADLLKYYAEIQNVFKEFEVQETMPTTQQLKDAFNLRMKNANEEQQEEAQISFWEVFDEFVKECGNQNNWTESTYEKFAAVKNHLKEFKEDVTFEYFDEFGLNEYINFLRDKKDMRNSTIGKQMGFLKWFLRWSFKKDYHQNIAYDTFKPKLKTTPKKVIFLTWEELNRLKDYQIPKDKQYLERVRDVFLFCCFTSLRYSDVRNLKRSDVKSDHIEVTTVKTADSLSIELNKYSKAILEKYKDIHFENHMALPVISNQKMNDYLKELGELAEINEPIRETYYKGNERIDEVTPKYALLSTHAGRRTFICNALALGIPAQVVMKWTGHSDYKAMKPYIDIADDIKANAMNKFNQLMESNNNHNIDKRYFDAFVHAVGSEIEQAQVRLITAANAQMLFHYWKMGNYILYQQNLYGWGGKIINKLAQAIRFNYPEKKGYSERNLTYMCQFARLYPLNVLRSFIEADSILSVPNIQNITNELLKLNSGQFTQELTAQIQSADNQSLEITQEVPAQFQNVAKTVATIYKIKIEDIEDLFLASPIARINWASHMVILNNPLPLGVRYWYMKQSVEMGWSSNVLKMQIETNLYDRQIKSNKVNNFTATLPTPQSDLANYLLKDPYIFDLAGAKEKADERDIEEQLVKHVTRYLLEMGNGFAFVARQKHFQIGDSDFFADLILYNIKLHAYVVVELKATPFKPEYAGQLNFYINVVDDKLRGENDNKTIGLLLCRGKDEVVAQYALAGYDQPIGISDYQLSKAVPENLKSALPSIEEVEEELTLFLDKDKNPMAGKIQTMIPQYGELNRIYRDYIDNYAFSFDRQKFISDFYQEYNDMKSFEAAILELVLDKQKEQYTLILNSLKTEIEKSIQAYEIRPLSDRAIERACYQHMERYSQEIEAQLDVTRSLSKPLNEANNRYDSIGYREHTAEEEKQAEKEYERCKAEYDREKAKLNKLYDQQKATRTEAFQYMKNCCADIYRQSCLFLDILKKYIPDGKQENKSSEPISQQETTEEQQEYFSMKLLSLIHEVCEGEQFEEISAPDFYANMNLHPCNCKLKIKPREKIRVCYLIFLMSEKLSKQDRDKWKDRILKLLDIDDSYYKSKYKEPVSDFPSDSNQNFAKEMEHIFRMTGEEFIFLSKHASGQAEALPQPVTDTEKKYVYGILGIAKLFGCSLPTANRIKKSGKIDKAITQIGRKIIVDAELALELAGKKTGGRKMLMDYMKEIKEISAEQAIILWQASRLSLSKIYEKAPEILKVQGSVIGTLGNFSASIGKAKSKKTFNVSAIVAAALKNGTVLRYVAELPEEKRKILYVDTEQSHYHCLKVMKRILRLAGLPDDRDNEHLEFLALRKYTPEQRIRIVEQAIYNTPDIGLVIIDGIRDMVYDINSPGESTRIISKLMQWTDDRQIHIHTILHQNKGDENARGHIGTELNNKAETVLLVEKDKSNGDISNVSAMHIRAMDFEPFAFRINDNALPELIEGYRPEAKKPGRPEEEKFDPYRHITEQQHRIALEAAFGLKEEYGYKDLETALIKAYMSVGVKLNHQKAVSLITMLRNKRMIVQENGRKYTFKPDFHYMDIQTAKQIKIADFLHSLGYSPVKQQGINLWYKSPLREETEASFKVNTERNQWYDFALGRGGNIIALAQELYCSDYVPYLLQKIEEQTPHIHPVSFSFGKQSFSEPSFQQLDIVLLASPSLLAYLQERGINTALAKRECKEARFTHNGKRYFAIAFPNISGGYEIRNRYFKGCIAPKEISHIRQSGKPRSACYVFEGFMDYLSFLTLRLESCPQSPDFDRQDYIVLNSVANVPKALYPLGSYERIHCFFDNDRAGMEAIQQIRKEYDATRYIRDASQIYSGCKDLNEYLQKMATKSSIHIKPCRVTSSGAHNRRTAEYMRNIGKSQIYIVPELTADNEQWINPNFGSPDLQVHYENIKRMVKEKTGRAMQEKERERKGKNGKIIKVAGCSPIREGVLLIRPDTTLADVRKFGEECQRRWGITPLQIFLHKDEGHWLSGQPESGDRESFQVGEKWFKPNYHAHIIFDWMNHDTGKSRKLNDEDMTEMQSLASDILLMERGQSKAVTGKEHLERNDFIIEKQKAELQRIEETKRHKEQQVSLAEQELKQVKAEIRTDKLKKTATNAATAIASGVGSLFGSGKLKELEHHIEQLHQEITKWDKATDELKIQIQQIQEQHSRQIRNLQRIHNQELEAKDKEISRLSTLLEKAHKWFPMFKEMLRMEKLCAVIGFTKDMIENLLTKKESIQCSGKIYSEEHRWKFDIKNDIFRVEKHPMDSGKLMLTINRQPIVQWFKEQWEKLQQNLRNSVQREQKSRGFRIMKPKEVLEKWIDCFNKADAYHIAELYATNAVNHQVANEPIIGKESIYKMFVNEFATAKMVCMVENIFEDGEWAIMEWKDSLGLRGCGFFHVKDNKIVFQRGYWDKLSFLKQHNLPIEMTEKQIVWYILLTEVKIDSDTQSVTSLSVAPLAVLPEFQRKGIGGGCMTKKEHTTITELFQVLDLLESLDMQFWLDGGWGVDVLYGQQTRLHRDIDIDFDANYTDQLLDLLQERGYQIETNWLPTRVELYSKELGYIDIHPFVLNADGTSKQPDLDGGWYEFQPDYFGTAVFEGRSIPCISAKGQQVFHSGYDLREKDIHDLSIIKQCITTMSLTIRMNHWKSTLAVIGIGQLISILTSTIVGFSIIFWISNEFKSPTALSLAILAGFLPQFVLGLFTGVYVDRWNRKKTMFYSDLFIAFCTLCLFIVITKGYKDLSFFYLLTACRSIGSTFHAPALQASIPLLVPKHHLVRVSGLYHSIQSFSEVIAPVVGASLVVWLPIQYILLIDVIGAVAACLTLLCVQIPSLQKTKVLPDFKKELTECWHTLRRTMGILPLFVCFTLVTFVLMPVFTLFPFMTLLHFNGNILQMGVVEMGWGSGALLGGLVLACKALKSKQTLVMHTAYVILGLYLISASYLPSSAFIGFVCLTFTGGIAYSIYHALFIAIIQQNLASDMLGRTFSLIFSLSTFPSMLGIVASGYWVEAWGITSVFMISGWVIFLIGVGANFISSIKQLDNYAMKKTIEYIAFDADDTLWENELYFQEFEKEFCNLLSPYQMSSSISEDLFKVEMKNLHMYGYGLKSMMLSMIETICKVTEGEGNIGLVNKIIELGQELLQRPVTLLNGVKEVLSAFQGKYKLVLATKGDLFDQQRKIANSGLQEYFTHIEIMSDKKKADYKKLLGKLECSPEKFLMIGNSIKSDIIPVLELGGYAAHVPHHVTWAYEQYEGKVEYRNFIQLNHIEDITNYLVASPFCESAAKILPFSITFQIFLNVFFELFFYEMKTFSFSDCYNMKDIPQLNEHNKEEYPPMHTTEHILNQTMIRLFGCGRAVSAHIERKKSKLDFRFQREPEESEINQIEQQVNRIIQSGLPITTEYITQEEALGRFDLRRLPDNASETVRVVKVGDYDECLCIGRHVENTFEIGVFKIISYDFKDGILRLRFKLLMLQFDIDVKTGIRLREVTLNDAPMIYRAIADHRDYLKTWLPFIANLSEQDEMDFLSQVLSFPEEERNFTFVIECRGEFCGLVGFVNSDFVNHRTEIGYWLLPEYQRQGIMTRSVRTLCRWAVEARLMHRIQIRCAVKNYSSNAIPRRLGFRLEGTERDGELMFSGEYVDTNVYSILDSEIISWSGKNIMKKRVLLLFIGIISFLSVWSQNDSLQSKSIFVGVRNNKYASIGFQAKNWSVGLENTIFIRHLNEQYIRANGTFRYSTGVWDVKFSAEAFFGTNYAGRFYDSGLKIGLDKKIGRVEFGAGVMPMYDSGMGYNTCYTVHAACRVIQEAALVLDITNIPEYRMVEHRIVPGILFRAHKLWVRPELSIPLNDNVQFTRVLISFRYDFLLKMLLLILSLGACSEEKEGELCFVGDSLVAGWDVKDAFPTWIVRNDGVSGAKLEEIATWNLNYQDKNVVMLIGTNNLGGKLFNDATRQEFITDFVDEYKRTIEGLAPRRVFVISILPRNREIDNPHINDYIKELNFALSQMVETLNYGVFLDVYDDFAYEDKMNMNYSLDGLHLNDLGYNILNVRLSKELMNRSIFKLVKTCVSIIVIVLVFDVIFGQVMSFYSKRYGLPGDYAKIEYLFHQANEDVVIIGSSVAINSFMPDIMMDSLGISVFNGGCNAQNIIFFRCMIDGLLEHHRPRGVILALQPDDLSDDHIGRIELLNPYYGRNPVIDSALVLQNDGKCSAFLRSNLYKYNTVWFRIFLQSFLPREEMANHGFVAKHKPNNLPIFENYGDEPDDDFIYSVKLEYLKAIITQLRSNNVELVVVFPPYYRKLRHEGNPYSKRVITELCRENGIRVIDDNQMEYFFDRPELFYDNMHLNGDGARIFTDMFINQILKSDFYKKIKSKKNETELGVMLFNSLEFILFFPIVCLVYYLLPGIKGRTIFLLLASYYFYMCWEPVYALLLLTSTSITYISALCMDRSRSRRRRKISLFSGIFINLGILFFYKYYEFAGSLITDFFSLLNIGIDIPRWNVLLPVGISFYIFQAVGYAVDVYRGTIKAEKNFVVYALFISFFPQLVAGPIERAKNMLPQFREKHKFSYENFDAGLRLMIWGFFMKLCVADRVSTYVDAVYNNYMEHSGVSLLLATFFFTFQIYCDFAGYSLIAIGSSKMMGFTLMENFHRPYFAKSIKEFWRRWHISLSTWFKDYLYIPLGGNRVGHYRHLWNLFVTFLVSGIWHGANLTFVLWGSLHGLYQIVGIEKNRLLPKVNVSKRLHTVFNCLVTFVLVMFAWIFFRANDLHSAFSIIEKIFTDRGPLFTGEGIPSLLLGFMCIGILMLKEIKDEMSIKVHALNSKNYWVRIISISLFIAFIILTASFNGGAFIYFQFMIRKAVFFVCPILGSKKSFFSDLINRLLRELHFCNKLSVPFMKNLSFFILVFFLSFLSPAFAAYDNLYLVGNATEAGWDPDAAIPMEKQEPGIFTWTGTLSDYSIDEGRFKFLVSNKWEPSITCRIDIAGHLLVESGKEYDLYERATANDGFDNAFQVPVTGVYTIRVDLNTMKMVCTGGDVIARENWEYVRPEIGADGEGHVFPGVCVPFGMVKLGADCGDRTNNSGWGRGGNIQGFSHLHVSGTGGGPKYGNILFQPMTGDLNLSDYSSARSNERFGLGLYEVSLSKYNVGVRLTASAKAGFHEYTFPQSESSKILIDAGSCLTLHVESQELVASGVKILSNKEIEGYSTVKGGWNLGGPYTVYFYALLDTPADEYTVWKGTSVQSGEQVDATGTEKTGAYFGFHTTEGQKVRVKVGISFISTEKAKANISELPSWDFDEIRNAGIAQWKEVLNTVEVEGNDNDKTIFYSALYHAFLQPTDRTGENPLWESSEPYFDDYYAIWDTFRATHPLFALLKPSRQADIVRSMIDIYEHEGYMPDGRSGNCNGRVQGGSNSDVLIADAIVKNLPGIDYEKGLAAMIKNAEVEPENPRNEGRGGVEEYNTKGYISTVTERSGTRTFEYAYCDYAIATVAKKLGKQDVYEKYLERSNNWKNLWNDNINSLGFKGFLWPKNGSGDWVNEKDYNVFRRDGWEGIVYESFPWEMSFYVPHDVNGLIARCGGKEAFLKRLDTYFTHVQDGFDQNSYMGLFQISNEPAFLVPSLYNYVNRPDKAAEIVRRVLKERYNTTATGLPGNDDSGSMSAWYIFHSMGFYPNAGQDIYLISSPVFTKTTINLDGGKVFEVLAPNASDKNIYIQSAKLNGQELGRCWLKHEEIVNGGTLELVMGDKPSDWAIDGEMPPSSPIGVEEVSPEIDSPQVRIHSYSAQVSNNEAAYCLFEEPGKGVKWCDNKSTNPWVIFELADVYMVDRFVFRDSKTVEGNNNVHSYRIYVSRTGNDGDWEEVVNRNDAEAGNANVKDHRLAEPKEARFVKFSMELPTGENAVRIYGFDIYGKLKERTDRGNLVSVGKTFLKSSGAKSFYTNARHIFDGLNENTEYHWDFDRSAADKHYCILDLEDEYDVNAFKVYDANQIEGYNIYVATETPDLNKINNSADENSVWTLVSSGDLNKTNKSVTVDRVKARYVKIEIPSGNIDGESATVTEFEVYMDGTSTGLTGTEREVTLLYPNPVKRGEPLNVAAQGRLKIYTIDGLNVCDVVVDGEASVSTQNFIPGIYLAVVSGSAGDKSFKLVVEMKITENNIIESLKSGEEQAFRYIYDKYYGYLCAIAKGYLSDNDAAETVVGDVIYNIWEIRKNLNIHTSLRSYLIRSVKNRSINYLQQEYIAKEISINSLQDYTEIESFYFIEEEHPLEKMLETELEKTIKSAIHTLPEECRTAFILSRYHDMKYEEIASQMNISVNTVKYHIKNALSKLRTELKDYLVVLLLFLLSNELYCNTIKKLLDLLNTMKRADIHTEHINNLILSFLNRTISSTDLKVLKEWIDENEDNKAYFSEIQKIWLISSIYEKKNFDKLKDRAFQQFKDRIAQKNQEQDIYISRPNWNRIFYIAACIIIAFFAGIGVMYFTGNQRLSDQTLSYSVESPRGSKLKLSLPDGTSVWLNADSKLLYDNNFGINNRDVTLYGEGYFEVSKNKNLPFQVVSDDIKVEVLGTKFNVKNYPEDPNIKVALLEGSVMLYDSLESTKLKPNQIAQYDKQNKKTTLKTIAAENTSAWINGHLYFDEENMETIALALERAFDVNITIKDETLKKMIFYGDFIIESNNIDEIMNIMAATNKFNYHYKIRKNEIEIFQMLKTVTICRSVYPLRFILLLGILFSFNVFAKQSQEEYIIERENWKAFIRLSDGTVDRYEFREHGVWKTIPFRHDRMAGPAWDGIMLAHDKKNPGSFIGEKDHILYNISYVPAQDHLIVKCSMTNTGSTPYAPKQSRLILGIDSEMHAYPQWDTKFFPTLLRCEKDFAWGYFMSPKQTIFGFTTAEPVASYTINYIYEGWLKWKWGHQIRTASLDMLHCLPLPERHPQNLTELAPGETKCWHIHMGQIQSLPDVKSKLSEWAAVPMIECNRYTITSKESISVRGYSTDSISIAIKGPGIKNQKSLTTDKKGNLYTTCFRPTQKGEYKITVTTRSGKTAEARIFVRQPWSWYMKNARDFVAENQPLFSNACETFYGYYTAFLAAKHFPDMAKDNALQERFDNTLPLIIDTTTWLPNPKSLPHRIQNFSALMGMLVDLWEYTGEKHYLEKAAHIADYLCSDKIQGPDGAYRSQGTHYTAVIYTAKSMLELVAAEEKLIANPVWKERHERHLNSARKAVDDLCGRLDDIETEGDMTFEDGMITCSALQLGMYGLQTTEPSQQKKYSEAARYLMDKHKCLEQLLIPDCRMRGATLRYWEALDVYFIPNQAMNSPHGWTAWKIYASYYLYLLTGEEFYLTDFMDTLGACAQIMREDGHLRWGFIPDPYIEAKLYVENPEQKHHGLVVDSIVGEQYLDMISPWLRPDDENTICQFKERGGAGDNTVQEIFKVMEECALTSAYVLIRKDGSILAYNCQVHKKNGTLHIIPDEAIISKVHLNTARETNISIQATGKKIRVKSVLGCKWIELNMNKKLIFLIVSFLYMVTATAQPLLIPYPRSIEIREGYFSLTAKTGIINLSDKNNARLLKHYIEEDININLHEQRGDNNIFLITNRKLKESLGAEGYRMNISADSIVIEGAENAGVFYGIQTLRQLAAQNRLAIPCMEIFDKPEYEWRDFMLDEARHFKGKVVVKQLLEEMAYLKMNKFHWHLTDDQGWRIEIEKYPRLTQIGAYRDSTQIGGWNSPLYDVNIHGGYYTREDIREIVDFAAERHIEIVPEIEMPGHTSAAIAAYPELGSLKTPPTVATYFNPTWGVFNVADERVIQFIQDVFDEIFDLFPSRYIHIGGDEVHPESWEANSDISRFMKEKNLDNYSEVQMLFTNRVASLIHSKGRTMIGWNDIMGKNIHEWADSDNESAHALAPYAIVQFWKGDTALIAEALKQGHRVINSSHRDTYLDYNHTKIPLEKAYDFSPFPKGMDRKYKPLLLGSGCQMWSEWIPRIEDMQRQVFPRIAAYAESGWTIENKKNFTRFSTSLSQILIPRWKQKNIAWHKESTPQAEMIKHYRTLLLVFALFCNTVVIQAQNVSLKLNNVTVKEAIEAVKKQTGKSFFFNVNDVDLNHRVNIDLKDAPLGKALSQILQGQDIDYEVKDNHIVLSKRNSTKNNQTFTVVGQVTDEKGMPLIGVNITAKGHGNTVTDIDGNYSIKAAPGTALVFSYIGYLQESVKVNKQKTVNVQMTEDTKALNEVVVIGYGTQKKANLTGAVDAISSKEIEDRPVSNLGRALQGAVPNLNITYGSGKPNEGTSINIRGFGSINEDAKPLVLIDGVEGNLDNINPRDVESISVLKDASSAAIYGARASFGVILVTTKKGQDGTAKVSYNGRFSFSSSTVKTNFLTTGYDAAKLVDEYLMSYNGTRYTKYSEEDFAELEARRYDKTENPERPWTVIKNVGGVDQYMHYANFDWYNYLISNSRPTWDNNLSITGGTQKLNYFVSANYHTEDGIYKQNTDRFETANIRARISGDVKDWFNLTVTSHLYHSRYKAPGLDNGNNIPNYTYHAMPFFMPYNPDGSHVFSTPIIAQQPTDGVHIMTADGETFSENKFKRLTTSVNATFKLYKGLTLHANYSFRYDTQDKVVRTAPAEYSTEPGVIIPVTGDLFKNKLRQRNNSEYYHMVDAYLSYDNTFNHHHIRGLVGFNYEQDYQKNLYSTMMDIQSNNLNDFNLGNHTEGVSLEGGQYEWALESFFGRVGYDWKGRYLAEVNLRWDASSRFRRDKRAAVFPSVSAGWRVSEEPFFAPIRNTFSNFKIRGSFGSLGNQAISSPYPYIQTLDLLQQNYLVNGEFLTYASVSAPTAGNFTWETVVHGNLGLDLGFFNNRLTFAGDLYIRDTKDMLVPGKTLPGVYGAASPKENAADLRTKGYELTLSWNDKFNLAGKPFTYGVSFALGDNISKITKYDNPTKDFNVSQYYEGMTIGEIWGYKIDGLFKTDEEAAAYQAEIDHSLIAKNILQTATGKYKGLKAGDPKFVDLDGNGRIDDGEKTANNRGDMRVIGNSRPRYNYSGSINLGWNGFDISAFFQGVGRQHRYPDGNAMLFWGGYARPYSSFVPEHFLDDVWSEDNPDAYFPKLRGYAAQGDRHLAKVNNRYLQNTAYCRLKNLTVGYTLPVDLTRKARIDRVRVYFSGDNLVTWTALKSKYIDPEQFSTDGSARVYPFAKTFSFGLDITFMKKNIKYIVAAVAGLWLTGCTDDLDRFPLSSLSPETYFNTEEELETFTNHFYSQFPSAASGYGESEDIVNIFTLPATTIGLTRTVPTKGGGWNWDYLREINLYLKYSHRCNNKIAREHYDGIARFFRAYFYFEKVKRFGDVPWYNKPLESNDPDLKKPRDSRQLVMDSIMSDIDYAINYCDDNSELYRVTKWTAMALKSRICLFEGTFRKYHGIAGHETFLEECATISKRFIDESPYSIYTSGDKPYRDLFASMNAIQQEVILARDYDYTKGVKHEANYNTMAQTYGRPGMNKKIVNSYLMTNGDRFTDQPGYKTMQYYDEMQNRDPRLTQTVVGPGYMRINSDKVESPNFSSSTTGYQIIKWVTDASGDGYMGSSNDYILFRAAEVYLNYAEAKAELGTLTQEDLEISIKKIRDRVGMPNIDMFAANANPDPYLCAPETGYRNVTGPNKGVILEIRRERTIELCLEGHRYYDIIRWKEGKMFEQPFLGMYFPGLTQGSGDNRYDVFDMNDGIAGDKEKVDICIYTGKKPSVKNIRKFYKLGEEFVLTDGDKGNIICHDIEKEPRQWNEERDYFFPIPTTERSLTNGALTQNPGWNDGLDFMEKFTFLGKKVAMSAFLCCFSLVGFAQEDTQTFNFDATETQEYAAFFKQPSAIEGKCNAEVMGIDINREGFSWDDMNTWKNSEGKIWHKYSDGYVETLFGVCANASAPFNGKTSSLSWTNSEGDNRWYPVLPAVKNLKGKFSLTNCKATVVHISNTQLDTVRIQMTNEDKDCYMHVRRNLNCKQLDMSGSTGKCRQLAGYKNAFSDENSLLFTDCRPAEFLDWLFNIEDNHYTFSTLPVHPTTGKVLGSGYKLQWEAAGGYPIGQMNADGEYEIAVGEDIDLSSEYDVDGNITTYTWKNIDGEEITPPDASDGWFCFDESNLNQEYRCEMTNEKYPALVLKTVFVKVVSEYTSGINKVENNGIAVGPNPAADYITVKGEEVQSVDIFSLTGACVKSVKDNVQTIEIADLAPGIYTIKVVTANGEKVAKFIKKMLRDTAGGEGAYPSHYRLPVLSTPSVLAATSPIFCVTKHRGGVLKYLPDSENMNFLLNHNTNKNTILSPSHRTPIAIVLRYDRRPPLKKNNLQTTLFHYIFVLYINSRKIFDNTSAFKTKTFIMKKITLLLAFFICLNISLNAQTYPKKENVIRLLTYNTHYCKGGSDPGSIDDYNTQRLASVIEALDPDVVALQELDSAMSDRRRRDLLKQISEFTGLDYQHIFGGLAPINGGKVGPGLLFKKDLEVVKKKIIPLAGDEARSAVRVDFEKFTFMGTHLDLNDAKRTQSASTLVNETDFIRKPCFLAGDLNDSHRWSNGGIAFPVLADKFSIVSDTEGNTIPGRTDNGALIDYILFKDYKDSGIKIVETHIVRTLKVNGSVIDLGSISDHYPVYVDIEIPGLSGIENASRSNSIRIYPTQVQNTLNIQSESPVRKINIYSMTGQKQLEANNPGTASVDISSLSNGIYIVEIFADNGTTFKGKIIKRMKKAILLSIVLAGTLFSVKPQSYPKAPGAIRLLTYNTHYCKGGYDPGEINESNVKKLAQVIKALDADVIALQELDSASQSRGNRYLLHEIAKHTGIEYTDVYANAARFDKKGSIGCGALVRKNLPIVSRYIAYLPGDEPRAAIQLELEKFVFIATHSDLNNEKRRQGTKIICNDSREMKKPVFVAGDLNDSFRWSRNSASFPLYQKDFIIASDTVGNTIPGRTNNGALIDFILLSKKGKNKIKIVDSKIVREINIEGKTIDLGEISDHYPVFTDIICKMLRHCFLFIGLIALWITSCSRTPEYTDSAARLAERIVPSHSDDFIFTLVPAEKDFFELRQNGDKIEIQGNNGISMARGLNHYLRHYCHASVSWCGDNLASIPDTLPAVGEPVHIEASQPLRYYLNYCTYSYSMAFWGWEEWEKEIDRMALQGVNLPLMAVNSQYAVWQNTLKRLGYNEKEISEFLPGAGYEAWWLMGNLEGFGGPVSQKFIDRQTDLQQKMLRRMRELGMAPVFQGFYGMVPNSLKEKFPEANIKEQGEWQTYQRPAFLDPNDPLFDKIADIYYDEQEKLFGKAVYFAGDPFHEGGQSEGINVKAAAKKILQAMRRKTPEAVWIIQGWQRNPMRDLLEGLEHGEAIILDLMACERPQWGGIKNSLFYKAEGHMHHDWIWCALPNFGGKTGLHGKMSSYASGVVFAKNHPLGKNLCGIGTAPEGIGTIPVVYDMVYDMAWREDSIDIKDWVNQYTQYRYGKADPNCNRAWEILSKTIYECHNEIGGPVESYICARPSDTIKHASSWGTAEIFYDPAEIVTAWECMYNVRHEFAQSATYQYDLVDLTRQVLGDYAKYLHKQAVNAFYRNDLKGFQAYSSKFLALIRDEDKLLSTRKEFNVGTWINQARNAACTPQEQERFVANAKRQITTWTNHDSKLHDYALKEWSGLMRDMYLPRWEAWVDYKLALLRGETAQEPDYFQIEKNWVDSDTRYDSTSTGNAISAVEEIYKKYFIELQQTYKNIMRHKIFIAFLSLLTATSTLDMAKAQSLPYKNKNLPIEERVEDLLNRMTVDEKIAQIRHIHSSKIFNGQELDMKKLTDWAGNTSWGFVEGFPLTGDNCAKSMYLIQKYMVEKTRLGIPIFTVAESLHGAVHDGATIYPQNIALGSTFNPELARKKTQMISDDLHSMGFRQVLSPCIDVVRDLRWGRVEESYGEDPYLCGLFGIEEVSGYLENGISPMLKHYGPHGNPLSGLNLASVECGLRDLHEIYLKPFEMVVKNTGILAVMSTYNSWNHIPNSASHYLLTDILRDEWGFKGYVYSDWGAIEMLKTLHFTARNSSEAAIQAISAGLDAEASSKCYPFLKGLIEKGQFDEKILDTAVRRVLFAKFAMGLFEDPYGKTFKNRKRHSPESVKLAKTIADESTVLLKNENQLLPLDAKSLKSIAIIGPNADQVQFGDYTWSRNNKDGVTPLQGIKNRVNKNTAIHYAKGCSLTSLDTSGIAEAVEAAKNSEVAVIFGGSASAALARDYKSSTCGEGFDLNDLNLTGAQSQLIREVYRTGTPVILVLVTGKPFVIEWEKNNLPAILVQWYAGEQAGNSIADILFGEVVPSGRLTFSFPRSTGHLPVYYNYLPSDRGFYKNPGSYDSPGRDYVFSAPSALYSFGYGLSYTSFVYKNLSTDKDKYELNDTIHATVEVKNTGKYTGKEVVQLYVRDKASTYVTPVKQLRDFKKIELAPGETRTVQLQVPISDLYLVDEKNQRFVEAGEFILEVGQASNNIILSKTIVAGEPSTIGNDEIVKPKNKKSSRQMEVKGEVRDVQATLVPDMQIIEKSTGKTIAVTDAKGQFKFTTGNHEYLIFKKSGYQTVEIEVNNMNVINITVNYGENMKRALSISCLWICLLVLSSSVIMGQDNHLDITPTPQSLVQKNGHFTLNSKTSFAIGKNQRADLKKVAAYFQSKILYSTGYNLNIKNSGSSNAISLQIDKSLKIGNEGYQLTVTPKKVIVKAKTPQGIFYGMQSVMQLLPPQIESETIIDNVAWEIPCVEIKDEPAYGYRGMMLDVCRHFHDVEFVKKQLDIMAMFKMNYFHWHLTDDHLWTIEIKKYPRLAEVGSVRRNADGSIHRGFYTQEQIKEVVAYAAERYITVIPEVELPGHALAALTAYPEYSCTGGPFELRNKWGVEDNVYCAGNDKTFEFLQDILEEVIPLFPGKFFHIGGDECPKVRWNECPKCQKRIKNENLKDAHELQSYFIHRIEKIILAHGKSMIGWDEILEGGLAPSATVMSWRGEEGGIAAASMGHDVIMTPSKWMYIDHGQGAVETEPIAIRFGLPLEKTYSYDPKSPKIPENLRHHVLGAQCNMWTEYAVTPEYTEYLLYPRMLALAELDWTPKEKKDYNSFTRRLDNQLIRLDMHHINYHIPMPEGPMADRIAYTENTTLTFHNSRNYSMVYTTDGSDPQTNSTKYEKPLYLNKDVTVKIATMLPSGKLSPVRSIEVVHEKLMPATEKSTQPGIELRRTEGNLYFVKDLDGAHWSAPKIVKDFEFKPDIEDKGAYCYTGYFEVPADGIYYFSSEMDELRIDGKVIISNDGKLIRHSRTRNSIALQKGKHAFQLLMINNNIGGYLRTWNNKGFILAPEGNELELPKPEKLTHMDSEKINRLIAENNLEKALAYIDEWLSNHSKDDKAYYLKGLVFWKQGNWKLTIENYLKAIEINPDSPAKQAYEMVMNIINFSNPDLYNPMEKEKSSREVPGWFKILILITALPVFAWPWLMNRATFVFVEKAAGDALPWALVMLLPLYVVLSTWISYRVYSTRREISWILQGLQMLVYLALFVLIFMSTYTEDTRKVTTHRLMEMKLRGEKISMLTAYDFSMATLIDQAGIDVILVGDSASNVMAGNVTTLPITLDQMIYHGKSVVRAVKRALVVVDMPFGSYQGNSKEAVASAIRIMKETHADCVKMEGGAEIRESIERILSAGIPVMGHLGLTPQSINKFGTYTVRAREEAEANKLIEDAHLLEEIGCFSLVLEKIPAALATRVAQEVTIPVIGIGAGGGVDGQVLVMHDMLGINKGFSPRFLRRYADLSTTITEAVQAYVKDVKTQDFPNEKEQYMIKNRNYSLDLLRVIACYLVIQQHASEFYYIGEGGTVVTGSNTFWIGIITTLCRSSVPLFVMLSGFLLLPMQDKISTFFRKRFTRIVYPFIAWCVLYAGYYVLSRGDSFSQMALNILHIPVNFGCEIGHLWYIYMLIGLYLVTPIISPWLQQASKRELEGYLGLWIITTFLPYIHLVYPEVLGEAFWNDTPLLYYFTGFIGYFILGYYLKRFGYPSAALSWIILIVGFALSAGIFCSRIDTVPTVPELELSWGFCTVNVFLMTLGLFSLIGRLSLKGKNAACKLLSDISIKSYGMYLAHILFLNFYYGLFKSISDAAYVTIPLIAVCTFITVYIFVYLLSYLPKSKYIIGMKSSFLADFKKFAMRGNVIDMAVGVIIGGAFGKIVSSVVADIIMPPLGLLIGGVNFTDLKWVMKGPEVVDGVEQAAVTLNYGNFLQATFDFLIIAFSIFLFIRLLTKLTEKKKEEQTAPAPAPAPSEEVKLLSEIRDLLKKNEEMQIKKFFFYFHIHIHCIQKKYLPLYRNFRNKIYLYEIQNCLFNCAACFDELLCDTLWLLNNITNVNVFKKAEQKKKKKVRCYFLFNKHLKFYYNDMIKVGINGFGRIGRFVFRAAQTRNDIQIVGINDLCPVDYLAYMLKYDTMHGQFDGTIEANVEKSQLIVNGKTIRVTAEKNPADLKWNEVGAEYVVESTGLFLTKEKAQAHIEAGAKYVVMSAPSKDDTPMFVCGVNENTYVKGTQFVSNASCTTNCLAPIAKVLNDKFGILDGLMTTVHSTTATQKTVDGPSMKDWRGGRAASGNIIPSSTGAAKAVGKVIPTLNGKLTGMSMRVPTLDVSVVDLTVNLAKPATYAEICAAMKEASEGELKGILGYTEDAVVSSDFLGDTRTSIFDAKAGIALTDTFVKVVSWYDNEIGYSNKVLDLIAHMAKVNGMAWYKKDTFGVYDEGVPVGLKKKAEQTVQPFSFLSEKMRTIEWEAPALASLAAAHWLVAYERENSPRKRVRYENEIEFDGVAYMLMCEIELVEREHKAVSMMCGIEPQYTDMPVRIIGNMGKAIGEILPVLNNFLDSYGVIYVMLITNLLFCFSKKVYTFVLVIKPHKYTTTFIEKQIIYGNFTILMENEAKIERIKTLMENFGVTQSEFAKRISIDASNFSKHLTGKLPVSDSLINRIVADLGVSKEWLCTGKGYMFRPSDNDAHSHIRTLTLPSEAIIPEARNGAKVYGLDVTAGNLARDRMFTEDLVIGSIDVPFINPDCSIVKVSGDSMKPVINNGDMIAIREIKNPQLIFWGQIYVILLEDYRMVKYIRKHDNPDRVILRSENKEYDDIEIEKKEICDLFIVENIIRIDSRIMSHEDFDTWSTLTVGFNYTKSLVICLTFYDYKNVQHHAYAIIEKDEAMAMSEQLNVKLTDLPQTICKHCGDTSYVFVPSHVEELFKDVLDFILDCGAHYRISRDMRKLLYIVLFLSVGKHLQATNYNCHTEAGQLQSLIEEQHRTITNLTVSGTIDVRDFAFINDSLFHLTGINLADCTIDAFESRDIYLGNQTRFDANCIPANTFFGFQELTTVRLPQNTKKIGKGAFAGCTKLKNIDWGNNLQEIAGFAFCDCFSLNTSLPQTLEKIGEYAFKQCTSFTGIDLSLSVLRSIGNQAFLNCTALSSITLPASLQSIGKECFAGCSSLTGITLPQKLESMGEGCFSHCISLTEVDIKECPLENLPPYTFDHCTKLLSIQAPNTITEIGEGAFYYCTSLTDCILPESVRTIGDYAFAGCSRIAGLSFLPEGTEKIGRWPFYGMKYLFSAKIPSTVKTIGDHAFDNCTRLNVMLSYPTEPPILGENVFRNVPQKDCRLGIPDESLSLYLNTPQWKEFDIRYLSEVDEQQIDDKALKAYFEQKMLIVNSYEPMHRITLYTIDGRTIYQKQGKMTEAKIDTQSYSGEVFIFSVQIESGKYYHLKLGRVNMGKNKLKKFDDLQGYPHVFQYPFSALQEKGFEMQGKWGKQFFKNENPIVLELGCGKGEYAVGLAKRYPQKNFIGIDIKGARMWSGAKQALEEGINNVAFLRTNIELIDRFFAKGEVSEIWITFPDPQMKKVRKRLTSTRFMQLYQNILSPEGLIHLKSDSPFMYTYTCEMVKANGYPVQVSTDDLYHSGITDDILEIKTFYEQQWLERGMNIKYIRFVCQPREQFIEPDVDIPYDTYRSFNRGKRSGKQSSQENTTSKMQLYPKLILDALAKVRYPGNGKDLVANEMIEDDIRIDGNKVSFSIIFDKPTDPFIRSVVKAAETAILTFVSPEVNIKGNIAVKARQTARPNPENPLPDVKNIIAVSSGKGGVGKSTIASNLAVALARQGYKVGLLDADIFGPSAPTMFNIEDTEVYTENIGGRDLILPVERYGVKILSIGFFVRKNDAVLWRGGMASNALKQLITDAAWGELDYFVLDLPPGTSDIHLTLVQTLAITGAIVVTTPQEVALADARKGISMFTGDKVNVPILGLVENMSWFTPAELPENKYYLFGKDGGKRLAQETGVPLLGQIPIVQSICESGDAGHPVALDDTITGLAFKQLAEAVVKATEERNATKPSTQRVEVHKMSRKKRLAVFASGTGSNFEAIVTACEQGKIPAETVALVCDKPSARVVERASRHGMKSFTFDPKSFASKVEMETVIADFLDENGVDLVCLAGYMRIISDTLLSRYGGKIINIHPSLLPAFPGARAVEQAMEYGVKVFGVTIHYVDRTVDGGRIIAQRAIPYEGNDIDELFGLIHAVEHELYPETIARLLSVMVVTLIILALSAVFFVSGKIRSDVVALCALVLLLLFHILTPDEALSGFSNSVVIMMIGLFVVGGAIFQTGLAKMISGKILQLAGKSEARLFILVMLVTSAIGAFVSNTGTVALMLPIVVSLAANAHINSSRLLMPLAFASSMGGMMTLIGTPPNLVIQNALTNAGFEPLTFFSFLPVGLICVFVGMVVLMPLSKIFLTKRGTEKSDGKNKNKSLNELAREYQLSENLFRIQIPEKSIIAGKTIVELNIRQQYHLNILEVRRTVSSQSRLLKTVNQKLADPGTVLCSGDVLYVNGDFEKVREFVSRFSLVLLDAHTIEDGKGNLTSDLAFYDIGIAEIVLMPSSRLLKQTVGDSGFREKFNVNVLGIRRKNDYILHDLKDVKMLSGDVLLVQGTWKDIARLSSEDSDWVVLGQPLSEAAKVTLDYKAPIAAAIMLLMILMMVFDSIPVAPVTAVMIAAILMVLTGCFRNVEAAYKTINWESVVLIAAMLPMSLALEKTGASEYISNSLVSGLGGYGPLALMAGIYFTTSLMTMFISNTATAVLLAPIAMQSALQIGVSPYPFLFAVAVGASMCFASPFSTPPNALVMPAGQYTFMDYVKVGLPLQIIMGIVMIFILPLLFPFMEEQKEYTAKDFKSDQYVRWCPGCGDHSIVAVLQRAMATLGVPPHETVVISGIGCSSRLPYYMNAYGFHTIHGRAAAVATGVKTANPDLTVWQISGDGDCLAIGGNHFIHSVRRNVDINVVLMNNKIYGLTKGQYSPTSDRGFVTKSSPYGTVEDPFIPAELVFGARGTFFARSLDVEMSVSQEVLVEAARHKGTSVVELLQNCVIFNNNIHSYVADKEFRADRTVHLRHGEKMIFGKDNNRGLVLDGYKLKAVTIGENGVTLDDILVHDAKSPDNFLHQSLAMMDGHELPLAIGVIRNVEAPVYDEEVDRQVKEVTSKVPYSSLREFLLTGETWEVKMTEKTKVKVLEEVVVRFSGDSGDGMQLAGNIFSNVSAGIGDEISTFPDYPAEIRAPQGTLGGVSGFQVHIGKGVHTPGDLADVLVAMNPAALKTNARYVKKGGVVIIDSDSFRASDLEKAAFTTDDPIQEAGLSHAQIVPVAITQMVKDSLADSGLDNKSIVRCKNMFALGLVCWLFDRPLEQAQHLLKNKFAKKPAIYEANAKVMRDGYNYGNNIHASVSTYRVESAQVKPGIYTDVNGNTATAWGLIAASEKSGLPLFLGSYPITPATDILHELAKRKDLGVKAIQVEDEIAGVCTAIGASFAGNLAVTSTSGPGLALKSEGIGLAVMAELPLVIIDVQRGGPSTGLPTKTEQTDLLQALYGRNGESPVVVVAASTPTDCFDMAFQAAKIALEHMTPVILLTDGFIGNGSSAWRIPEIDEYPEIKPNYVMPEQQGTWKPYDRNEKAVRYWAKPGTEGFMHRLGGLEKDYKTSAISTDPINHEKMVRARQQKIDSIATDIPLLKVSGDSSADLLVVSWGGTYGHLYSAVEAMNAEGKPVAFAHFNYINPLPANTEEILRRYKKVVVCELNNGQFASYLSGKVPGVNFLRYNKIQAQPFMVSELMAHFSKLLEEMAGSFACKSNAGVAPQEQLLGTMAGNRRLSIGLPAEHNGGEKRFPLTPEGVALLTKEGYRVFVESGAGEGIKYSDLHYTEAGAQATTASEVFRCDVVLKITPLNEQEAAMIHPGVFLLTLLQLQYQSASVVRILMQKKVTAVAIDLITDERGRYLFADILDEIDGRAAIVLASELLSNRSGGKGVLLGGIPGVASSEVLIIGGGLAGRAAARAACGLGALVRVFDNDFYRLKATQLEVSPSIFTSNMHPHVLENAMRSADVVIGTEVPEGGRLGVSYIEMMKRGALLFDLCMDKGGCFETSSCSEAPCNKVYEQCGVLHYCLSSVGSAVARTASMALSNLLVPVLIDLNDPAMLYGHIKSDERLRNAVYLFGGKLTYKELSIRLGLPYYDMALFMSMFMKPLFLVGYMAAGKTTLGRRAAQLLNVEFIDLDAYIESRYRKRVSDLFAERGEEGFRDIERRMLHEVAEFDNVLVATGGGTPCFFDNMEYMRHRGVTIYLAASVQTLCRRLSHAKVKRPLVAGKTPEELYEYITEMLNRRESYYRQADYRFDADGYESLDSVDEAVHRLAVLMQNPAYGDGADEIMGRIGIYGILSVVLFGLIGCAPGKSDKEESVRLYKEAIVLLGSDSVTIDDCLAAQRLLEQALDADSENIDVYFGKVLNELNLWRPDSAYRTASAAIEKIGETGKNRMKAYFYTVKGFIAYDRGDEADAEKQLSEALSLYESYLTEDPANMDYLLNKSVLLSGLEGKQTALDFIAKSPLKEADKQALIHSLSEFEFRQFGETWRAKHDALVANGQTETNTISNTFKKMAKYKYYVVWEGRARGIFDSWEECKEQVDNFKGAKYKSFDSLEAATEAFRNAPDDYFDVMRKIGEHSRDKLSAPILPPSVIADSLSVDAACSGNPGKMEYRGVDTKSGIELFHVGPLEQGTNNIGEFLALVHGLAYLQQRDSDIPIYSDSRNAILWIKQKKCKTKLAPNAANAPIFDLIARAERWLHTHVYANTIIKWDTEKWGEIPADFGRKMLTLSVIKENPEEVIRRLAIKHFDGKEAINRVLELDKIRRASQAELDGKLAELKVLAAQTGQLMKAGKKEEAEAVKMKTATIKESTKELEESMVSAEKEITDILLTVPNLPYAGVPEGRTAEDNIVEKTGGVIPELPADALPHWDLAKKYDLIDFELGVKITGAGFPVYKGKGARLQRALISFFLDAAREAGYLEIQPPYVVNAASGYGTGQLPDKEGQMYHCNEDDLYLIPTAEVPVTNLYRDVIFNESDLPIKNTAYSACFRREAGSYGKDVRGLNRLHQFDKVEIVQIQHPDHSYEALEEMKAHVQSLVERLELPWHILRLCGGDMSFTSAITFDFEVYSAAQKRWLEVSSVSNFESYQANRLKCRYRGADKKTHLCHTLNGSALALPRIMAALLENNQTPKGIKIPKVLVPYCGFDIIDMNLFDQVSNDIKSAMLAKDKVRLEALRGIKKEFLEAKTAKGADGELTDDMAMKILAKMVKQRKESAQIYTEQNRPDLAEPELAEAAVIETYLPKQMTEEELTEALKAIIAQVGATTPQEMGKVMGVATKQLAGRADGRAISAKVKELLAMNELDINNPQLPDFIVPGADEKKQDEPAKIKVIGVGGGGGNAVNHMYHQGIGGVSFVLCNTDAQALRNSPVPVKVQLGAKGEGAGNIPEVAKKLAEESAAEVEALFDDNTRMAFITAGMGGGTGTGAAPVVARIAKEKGVLTVGIVTIPFLFEGEPKILQAFAGVEEMRKHVDALLVINNERLCKIYPDLSWTTAFAKADDSLSNAARSIAELVSKDGKINLDFADVRTTLKDGGAAVISTGSGEGEHRMSRAIQNALTSPLLKESDIYGAERVLFNLYFSPEEGEELRMQESKELSEFMLRFKKKVNVIWGYTHDSSLGKALKITILATGFEVSDLTFKGEYGGDADEHIAQSQYIVLKPDQLDDNDLLEKLDKTPAYDRPKDFRDNFDGSEKKEESNGSGRRTIRFMDTERYIVAVEIGSSKITGAIGTRSLKGVVTVLGVDTEPLTGSVKRGFVVNPDEVSSKVKRLIRKLNNRIGASKKIKQVYVGIGGQSLHAEDHMISRDYPEGTPITEDIIKRLQEEAREMPIAGADILEVVRTGVLVDDKPKSGREEIEGSNLKMSLKLIVARDDLKKSVSRCFSGEPSIVRYIPTPLSTAYVALSNEDRQAGVMLVDFGAETTTVSIYKDGLLRYLSTIPLGGYNITRDIMTLKVTEPEAESFKVRLGSAKVMGEESNITLRGESSSEIKSLDLSKVVKARIEEIVANVNAHFEYAKCDRKSLGAGMVIVGGASKLSNLAELIAEKCDIRVRKGALRQDMLLDVASQSKSADYLQILGLLYCGKENCVEVLPKVVDEPEDEPHEEVKPLSPKEKRAQEKAQEKAEQERRKREAADAKREEKERKKREKEEKVKGPGLFGKLKEMVKKAENLLDDENDNFMKVLLRFLLMVVLVSYLFVSFFFLRSYAAEDKCRDLQVEITDSAVLHYISPADVYNYIEDFEMDPCGKPLGGIDTEKMERTLMSNGVLGSVECYKKVGGTVCVEVTQRVPIMRVMADDGNYYVDAEGQRMAVRTQYQAHLPLVTGRVDSVLTYRDMLPLARYIYNHRFWNAQIEQIYVNERHEVELVPRVGGQTILLGSVQDFETKLDNLMLVYKKVFSKAGWAMYDTVSLKFKNQVVCTRKKKMKQYTSLYFVGAGGIGMSALVRYFLAKGYKVAGYDRTQSPLTTELKAEGLEIVYEESVESIPDYCRNPETTLVVYTPAIPASHVGLVYFREHGFRVVKRAELLGLITQSSKGLCFAGTHGKTTTSSMAAHIFHESPIGCNAFLGGILRNYNSNLILSEQSPFTVIEADEYDRSFHWLHPYMAVVTATDPDHLDIYGTEEAYLESFARFTSLIQPGGCLIMKKGIKLVPSVKENVKIYTYSARDGGDFHAGNIRIGDGTIVFDFVMPEGSVADIELGVPVEINIENAVAAMAIAWLNGVSGDDMRRAMASFKGAKRRFEFWVRRPDRVMIDDYAHHPDELKASIRSVKALYPGRRLSVIFQPHLYSRTRDFAPQFAEALSLADEVFLLDIYPARELPIPGVTSKLIFDKITCRNKELCLREKLLERIKECNFDILLTTGAGDIDRLLPEIAAIVESKMKRTIRVLISGGGTGGHIFPAISIANAIKVKCPDAEILFVGADNRMEMEKVPAAGYPIKGLPVSGFNRSNPLANFKVLWRLWRSLRMARRIVRDFRPDVAVGVGGYASGPTLWAAAHRGVPTLIQEQNSYAGVTNKLLASKAHTICVAYDGMERFFPAEKLVLTGNPVRQDLCNEALTRTEAAAFFGLDPNKKIILLIGGSLGALTLNTAVAESIPEIVKSGVQLIWQCGKRFDERAKMVLEAAGNPTCIKQMPFIARMDLAYKAADLVISRAGASSISELCLLGKPVILVPSPNVAEDHQTKNAEALSSKGAAILVRDAEARQRLMPCALSVVHDEESLTSMNREIAALAQRDSAARIADIIFDIVNKKMEIEVSEKEKRRSDPYIWGIIIILYIVSVVEVYSAISREITGGDVYSPIIKHIMLLFSGFVITYVTSQIHYKWFKVLAYLMIPLTIVLLVSILFWGDTINGAKRTISVLGVSLQGSEVAKVTIVLAMATVLAKTQIKRGVNMKGVLWVVGLVTIFSALLFTQGLTNTLLFIGISVCMMLIGGVEFYKLFGILLVYVVLALAVMQAKDLITEVKAQPETQEVTVQDRNEGDKVIVRSSTWKSRLKDFFDPTPEYEKETTHKNLQEHRAAMAMAHGGITGVGPGNSRESSRLPLAFSDYIYAIIIEDLGFIVGGIGLLVAYLMILARAGLIARRCTRAFPALLVMGMAVMIVLQALFNMAIVVGVFPVSGQPLPLISKGGTSIWMMSFGFGVMLSVSRYAVKDSGKKIKTEKENDLPEDLQAANPTNLAMEKKKRIVVLGAGESGVGAAVLAQVKGFDVFVSDMSVIQDKYKEQLDRYEIPFEEGKHTPDLILNADEVVKSPGIPDRAPMIAALREKNIPIISEIEFAGRYTRARMICITGSNGKTTTTLLTYHILKSAGLKVGLAGNVGKSLALQVATCDYDYYVIELSSFQLDNMYDFKAHIAILLNITPDHLDRYDYKMENYVDAKFRIIRNQTEDDAFIYWNDDPVITEKLSQLPLKSQRYPFAETHEPGTQAYTEDGALTIDTPEEKLTMETDELSLHGRHNLYNSMAAGLSACLLNVKKEYVRKALSDFESVEHRLERVASVRGVQFINDSKATNVNSCWYALESMKTPVVLILGGKDKGNDYSEIEQLVRDKVKALVFLGVDNSKLHAFFEGKVPYITEASSMKEAVDKSFALATPGDTVLLSPCCASFDLFKSYEDRGDQFKACVRALMLYYLFQYLESSFDFPGARLFSYISFRSGVAFILALFIATIIGRRIINKLQILQIGELVRDLGLEGQMSKKGTPTMGGIIIIIAILIPCLLVGRLGNIYMILMLITTVWLGAIGFLDDYIKVFKKDKEGLHGRFKIVGQVGLGLIVGLTLFLSPDVVIRENVAVQTPGADTEVVKYESENIKSTQTTIPFFKNNNLDYADLVPFLGEHAQTGGWVIFILLTIFVVTAVSNGANLTDGLDGLATGTSAIMGLTLGILAYLSGHIAYASYLNIMYIPGSEELVVFASAFMGATIGFLWYNAFPAQVFMGDTGSLTLGGIIAVFALCIHKELLIPILCAIFFVEDLSVMIQVAYFKITKRKYGEGRRVFKMTPLHHHFQKPGNAGINALIQKPLQAVPESKIVVRFWIVCIMLAAITIVTLKMRMKNVECLLSGIKVVERKGAVVTEVSGVESDSRQVKKDNLFVAVRGASVDGHDFIGQAIAQGAVVVVCEEFPEKSEPQVLYVKVEDSAVAFGLLAAAWYGNPSKELVLVGVTGTNGKTTTATLLYEMFRLFGYKVGLLSTVCNYIDDIAVPATHTTPDPLHLHRLLREMVDAGCAYAFMEVSSHSAAQHRIVGLDFNGAIFTNLTRDHIDYHKTVEAYLKAKKSFFDGLPKGAFALTNIDDKSGLVMLQNTKAEKHTYSLRTLADFRVRIIESRIDGMTLEINGKEVEVMFVGKFNAYNLLAVYGAACLLGQEPEEVLRKMSLLIPVAGRFQTLHSSKGYTAIVDYAHTPDALNNVLSSIRDVLGNRGHIITVVGAGGNRDKGKRPMMAREAVNLSDRVILTSDNPRFENPNDILNDMLEGLDAEQRRKTLAIVDRREAIRAATQFAQPGDVVLIAGKGHEDYQEIEGVKHHFDDKEEVEKLFAEERIMETRNRNHILLRYALVIVGVLVFSVAIVKKAADTCIIHADKWNEKAARMLSVTHEVMPERGDILAQNGEVMATNMTYYRALIDFGVPKFKSREFNDSLKTLCKLLGKYFPERTPAAYEKAMRTAFLRKKRYFVLVREITGRDYELLKTFPFLRHSTQYSGFHIDPEREKIVKREKPYGTMASRAIGGLDETFHGNSGLEKALDSLLYGIPGKTVKKQIPSGMVDWVAEPPRRGLDVKTTIDVDIQDITEQALLQTIEETQPEFAVAIVMEVATGDIKAMSNLSRLPGGEYVETVNNAVQGYEPGSVVKPLSMMVALDDGVIRPHDVVNGHDGVFRYPAGMKVRPITDTHGRASMTATEAMKYSSNIGLSEIILRGYERNPDEFVQRIYKSGFMEPFDLCIPGAARPTIRHLKSTVQDRINLTRMSYGYTTKIPPIYTLALYNTIANDGQFVKPRLVKELIRDGVTDTVFDISYIRKQACKPETARALRNMLYAVVNDDDGTGRRARSKKVTIAGKTGTVRTIGSDGKYETRYRITFCGFFPYENPQYSCIVLLGKPNLPGMPSAGYYCGGVLKKIAETLYSMGRLDVPMDIPSDSTSVRSPAILKGDIAETRQVLQHLGVRGDVTQCRDMEVYCDSMPDVCGMGARDALYILEREGLNVNIQGRGKVVEQSIPSGKVIQPGTTVILKLKMAKKGKNEKGGFIKYLKLLVQGRIFSLDFFRSHWVFIASVVFLVWLSIANRYVCQTKVETIKDLRFELSNAKTERVRATARYMGLVRHSRIIALVNENKLGLEIPDTPPVKLIPQDGDKEMELQSAVYHVPALLEECIDGLNIQPGGTYVDVTFGGGGHSRAILGHLGECGRLFSLDQDEDARQNSLDDPRFTFVHSNFRFLKNFMRYYGVERVDGILADLGVSFHHFDDSDRGFSFRFEGPLDMRMNRRSGQTAAQLIATCSEEKLADLFFLYGELKSARRIAAAVVAARSSAPIETTERLLEVVRPYINRKQEKKELAQLFQALRIEVNQEMESLRRLLEQSVELLPQGGRLVVLTYHSLEDRMVKNFMKTGNVEGRAEQDFFGRINAPLRPVNNKVIVPDEAEIERNPRSRSAKLRIAEKVMLFLTFFLYFFKSTWLSQSSETTLRFDSQTKTSRKLTKTKKNTVILYALFTNDMSSEPLKIDIEKVVKEKAPKYAKKIPGFLFRYLERTIHQDEINYILKTYKDSTGVKFADDLLSYMNVHINVIGKENIPPEGRFIFASNHPLGALDGVALIRFFGHFYSGKIKFLVNDLLMHIKPLAPVFLPINKYGSQAKESSLQINNAYESDEQMLIFPAGLCSRLQHGKIKDLEWKKTFIAKAVQSQRDIIPIYFEGRNSTFFYRFAQIRKCIGLKFNIELIYLPDEMFNSKNKTFDIYIGKPIPWQTFDKSKSLQEWAQIVKEKVYQIKKNQMEPIIAPVDKELIKAELTPDRFMRDTRKGGNKIYIIDCNNAPNVMREIGRLREIAFRYPGGGTGLPLDIDEFDTMDPPCQQLIVWNPDAEEIIGGYRFIVGENIRNDEMGRPRIATSHLFEFSQKFLQDYLPHTIELGRSFVTLEYQSSRAGAKGLFALDNLWDGLGALTVDYPQIEYFFGKVTMYPTYSQEGRNMILYFLNKHFPDPDRLVWPKHPLQTDTDEEKMSKLFIYDDFKEDYKILNQEVRKLGYNIPPLVNAYMGLSPTMKMFGTAINDEFGNVEESGILIAIKDIIAEKRSRYIETYDKLPPIKISMKYFHFIPAACIFLFCQCGGQDSHFLSDTKYIPVFSEDSCQYIDHGDNLHFTGAYSDASLFYDNMALICNQSDKKWGYIDDSGELQYPAVYTRATIFNENRAWVVRPDEAPCAIDTKGRLQLTLTRASKVMIFCEGMAAFAQKEKKGERWGFIDKSGTPVIKPLYKDVKPLSSGLAAVKNEQNLWGYIDSKGIERIPAQFSSAESFSKEGHAVVRSAKSGLFQVIDTKGDTLWTIECDALISDGNTFRIKKDKKWGWCDNKGNIFIEPRFEDSESFGNTDLAPVKIRGKWGYINRKGEWKIKRQFSKAFPFFDGLAVVQTGTVYGLIDPDGHFQINPQYDRISEDYIYQSIGKGSAFTLVESDHARYKMKKVWSILAVLSMSLTALQAVETSVKQLSVDDFYKMKVYNNFDVSYRQSADSAGVIVIMASTEDISHVECVSKKGQLTIKYKGSSDKEQMQGAIIVYSTALEYVENNGLGSIQIVSPISGAAFQAKVLGNGSISAPQIDYGIVKASVLTGKGKISLTGKCREAELSVTGAGQIEADRLTARDVTCRIRGVGVIGCHATQKLTAKATGNGEVYYRGTPEIKKLSLGELSVRSLEGKMKIGNLDFGKYPLLLAPMEDVTDESFRLMCKEFGADMVYTEFVSSDALVRNINSTMRKLSIQDAERPVAIQIYGRFVDAMVDAARRCEEANPDVLDINFGCPVKKVAGKGAGAGMLRDIPLMLKITRAVVDAVKIPVTVKTRLGWDHDSKIIVDLAERLQDCGIAALTIHGRTRSQMYTGEADWTLIGEVKNNPRMRIPIIGNGDVTTLQIAKERFDRYGVDAVMVGRASFGCPWIFKEMKYYLETGELLPPLSIHEKMSVLRRQLRESVARLDERRGILHIRRHLAATPLFKGIPNFRDTRIAMLQANTVDELTAILDKIECDILPEQIMEEFQTHTLPNGLRLIYRPTQSAVSYCGFTVNAGTRDEDEGYSGLAHFVEHTIFKGTTHRRASHILNRMEVVGGELNAYTSKEETVVYSVFPGAHLARAMQLLGDLVADSQFPERELCKEREVVVDEINSYRDTPSELIYDEFESSLFEGCSLGRNILGDVDSLTRITSDVARRFLTDYYTPENMVFFFMGSTSFNRVRGLAERYFGHLCRPKKELSRELQPFVESFSRTVSRDTHQSHVIIGARAYDLFDKRRRPLLLLNNLLGGPGMNSVLNVSLREKRGYVYTVESSVTSYTDTGLFTVYFGTDHRYTQRCIDLVKRELKRVREQRLSPAKLAAAKRQFMGQIEVSTDHSENVALALGKSFLRYGRFDSLEEIASLMERITADDILEVANELLSEDRLSMLIYEMQNITIFCSASDTVAPIYKNEAETVGQWIGTHHKTLVYGGANGGLMEIVAKEVRDNGSQVLGIITRHIAEMGRSSQQPTDLVTTDSMGERKRLLIERGDILVALPGGIGTIDELFDALTTKMLGTHDKPVIICNTQGLFNPLIQQIELLRKENFLRYDRPDLYHIVPDAKTCCELLERYNRMTGDKGTTSLVGGQRTTKNDPRLEAYGTVDELNAHIGLLRQTGNRSEDDALLLFIQNKLFVIGSYLATDTSFTQLREASRLCPEDIARIEDRIDTLDATVPPLHAFLLPGGTAAAAQAHICRTVCRRAERRICQVAQEVLVDENIMKFINRLSDYFFVLARFNNYTAKQDEIFWDKDCKMRSGAPLEVIENLQEMEDEGETYECIEDIWPDYPSKEDFFFNEEEYMNVKSVILKSENQTQVSVTRSIEGICIQKIVMPISPLGFINLMHHADSKVNPRKAKINPIVKAIEETLQFSPELYFFSSKGILLSSIYVDLLDRNRVRLSFSEEEMEGIMDGGHNAFALCRFIANVINDDNLKTWDDCIRYYRNEDTFASLKVGYESHIGQLKFSIPIEVIAPVDKDEASIEYFSNHILEICSARNANVSLNEATKSNKEGLYEDLKRCLKGSYRENIAWRSGEPGTIKCDDIVALACLPLIKLHECGYFDGNPNIGVLNRIAIYSQKSLCVKYYRNLMKDKSVSEQQLGKYDLTDNAIRSGFELVDDIVRFFDKIYYHFPMVYNRNSGSFGRITGVVQKENETGGYISKFTGPFNTYPKRSIYNYAYGFFYPIICALTSLMVFENGKLKWRINPLTINFEDEKVINNFAFYIDMVKQVQYDPQKVGKSSLSYKVADIVLQNIMNEMLAMQLETAELYFITSLEDFAAPLMQTLNKVFLKPSLLSSLPSKNTTVIIMKSYRTMCKKTWAVILAIACHLPATWATNANEIEIIPKPVHVEQTSGNFRLSPKSTIGYDAALQGQAEYLQQVLGQSTGWDLKLKKDARKATILLTLNPEKVDKPEGYRLDVTPKGISLTGRDAGGIFYGIQTLLQLFPPQVYSDKRQHGVEWIAPAVTIYDAPNRPWRGMMLDVARYFYDKEFVKKYIDMMAMYKLNKLQFHLIDDSGWRLEIKKYPRLTEVGAWAGPDHNRLGGFYTQEDIKELIAYGQVRNVEIIPEIEFPAHILSAVVAYPWLSCTGLQHEVPTQHFISRDLLCVGKESSLQFLRDVLDETVRLFPSSYINIGGDEAVYTRWEECPDCQKVMKREGLKKASELQGYLTNVVAEMMKEKNRTVVGWEEIFLRGDVKTPVVGLIWHNVRDTLLATQRGHKAILTPATHMYFDFPESRTPGEVKAATWMPPISLEKCYSMEINDYSPESTVLGVQGCFWSDQFIHGTVLQEIDYLNENRSENYAEYFTFPRLLALSEVAWCRQSDRNYSDFRCRLSHHFNRLDFKNCHYRVPEPIIEQMNPTATGAIEFTLSPAVADADIRYTTDGSYPTVHSPLYTTPVTVNDKSDFRAITVVNPRHYSLPIYFAPDYSGYKQYGEYTAEWKPLNVQPYLTPWRFECTGKISGNGTYTVSFIYTKGETPFRLGTLKLYKRDELLAEVPQSVLINANSPVATYRFTVDSFEAGTPFFIEVEACGEKGNDTSGLVFINKVTQMAKAHIFISYAHEDKEWVLEGPGNIHLIPRIRRHTSPDAEIWFDEGLVIGEKWDEEIHNHIVQSHIAILLISESFVSSDYIVNKELVWIKEQVEKNDMKIVPLLIGNITEKSKRIIDWIYQRQIHPSETQPLCNYLNDKAQWDHMITSILNIIDAKIDQVLETLLLNESTRQTENSIKPSVMPDSKTVTGYIENRDTKITDKTTAAHPTGVNPALYQEAIRLYRNHKYKEASDILLKLAAANNPEAQNLLCDILCNKVKGYQLWPGILETFLPYAEENLAFAQTIVGKVYYRGKLNERNYEKAFDWFSKAAESGNSYAQYLLGNMYENGTFVEQNYDTALSYYKNSAAQNNIMAIGEMAYMKDNGYGMPMNKEEAEKIYLQLAEERDDEWSMIKLSYIEMDRGNSEERLKWIQKALEKEYIDAYVDLGIFYQSDEKYKDLEKAQQSYYQAAQLGNPEGMNGLAMIYYDMPDNKGDEQAFRWFSKSADLGDSLGLYYLAVMYENGFGTYSNKQKAWDLYLASADQKFSPAYRKIAQLIEEGEAPASFTGRELEYYIKAAERNDIDAIHDVIRFLENDPDRQKELFSWCQRGAQLNNGKCICKLGKLYFYGMGTEMDEFKAMNCFRKAETMEIPEAYYFLGLAYYEAKGVVSPNIQKAEEYFRKAAEAGYSDAIKAIAELYMQSGQENGYEKAIEYLKTIAEGEHADIAYEGLMRIAVEQMNAQDYDDPQNSELYQKALRFETSGKEAGMTESLSKAFLDRGINLYNIEKYESAIAPLLLAAQMGESEAATHLGDLYFYGHGVDTDYEQSYYWFAKAAQSNNAYAQYSIAFMYIKGQFVEKDDTQVIKWMKLAAENGYTEAQKNMGEYYYYGSFGCRRDMKEAIKWYEMGAKSNEPTCVFTLGLIYEEGDGVQKNILKAADWYQKGAQAGIPSCLYNLGKLIINKEISGEEEKGFNLIQQAAESEYSFAQNYMGRAYRFGWYVNANPVRATNWFTKAAEQNMPDAMCNLGDMYSYEDGLTIDYEKAFYWYEKAAETKHSRALTELGDMYYAGKGVRQDYQKAMEYYQKACDEGYPYAFYSLGFMYWKGQGTLPDKEKAQEYLSQAAAMGNESAFQLLNRMDHESEEEKDIDPFARQAYLEAQQALADKETEKYINLLSQSANLGYVQALNDLGDLYFNGELAPKHMGKAYEYFLKASQNGSGYGSYSCGFILMKGSADIPRDIEKGLSMFRLAVDQNYKAATRDLARYYYSLETEEDNRKALDYYLQYIEYNPKDTDTLLHIGLIYESGLGVPLNIDLARRYYERAAEQDETGMAYNFLGGTYMNDEETENNERKAVHYFQKAIELGNTNAMFRISYYLHNGKGGLQVDIPREIELLTEASKRGNHQATYRLGLLFEDNESGMAQNLELSVKYFQLAADNGILAAINKMGELYLFGEVIPANLTKAISCFTAASEQGYGKASYWLGRLHTDGIGQLEKDTQKAMNYYRKAIEQGYEEAREWMEQLQKNLVDETITDIEIPQDKSDEELYKEAKNALEKAQFKTAYAYFSYLTQRNHAESFNELGDMYFYGRGMAINQAKALELYKKAAALDSVYGFFNVGFLYWNGPEEIQDPEQALQYLKKAAQMGYTYALSFIGDIYRTGPEELIDYAEAKRYYQKGVDVNEINAIKGMALLYLLGQGVTQNNAMGAFYLKKAADKGNAWAMYHLGRLYYYGEGIPRNPKLALDYLQMAYDANYPDACSLLGLLYERGEGTAPNIELANKLYIRGHELGDDQSMWYLACNYLDGNGLPKDYKRAEKLFIQAIERGNEPARIDLARMIFHGLGTVQDPQKAYEIIKPCLEQGYGRAYMLMGEVYENGLGVEKDYKQAKELYRKALDLGYSFAQEALDRLDKFCMSFPKFVDSVKRFLTHYLDMSQDREEEAASVEAIRAGVEFKGSTILILVFAIFIASLGLNTNSAAVIIGAMLISPLMGPIMGIGLGLGINDYELIKRSFRNLAVATLFSVITSTIYFWVSPLNEARSELLARTSPTIYDVLIAFFGGLAGIVAMSSKQKGNVLPGVAIATALMPPLCTAGFGLATGNFYYFFGAFYLFFINSVFIAFATTLGVKLMKYSKKEFVDDERRKKVERMVYTILILTMAPSIYLTYNMVKENFFEVAASRFVSQNFNYADTQVLSKSAVTEHGKHIIRVSLVGAEIPKDSIAVAQARLPQYGLGGAILEVRQGYGQNQADISTLSSVMFKDIYLHNQEQIARQQKTIDSLENLASHYQQYDSVGVEVAPEIKVLFPNVTDIAISKTIFSRIDTEARDTTTLAVVRHSKVFSLSEQKRFKEWLQARLGTKKVQLVIEKMAGMKSLAKDTAIYGLSSILGRFLNWCFVFLYINVLKTTAEYGIVTNLYAYMALLLIILTYGMETGFFRFANDKEEKEPQRVYTTGLISLATTSTLFFVLVWVFITPLSRLLGYPEHEDYVLMMAAIIAVDAFTALPFAYLRYRRRPIRFASIKLFSIFLNIALNLFFILLCPWLYGIHPEWISWFFDPDFLVGYILVSNVISSGVVLLVLFPEIFGIRYRFDRHLLSRMLKYSFPLLILGIAGIMNQTFDKMFYPQLASNRPDAMSELGVYGAVYKIAIVMVMFTQAFRFAYEPFIFARNKDAGDGNKKSYSDAMKYFIIFGLFIFLAVMFYIDLVRFFMPATYCTGLKVVPIVMLAELFFGVFFNLSLWYKLTDRTQWGAWFSLFGFAITAIINIVGVPRFGYMACAWGAFVCYASMMLASFFIGQRVYPIRYDLKSAFRYTLLTVVLYAVAMVVPIESLFLRLAFRTLLLGVFLVYLFRHDLPMNEVPGLRRFVSKFMENNRFDIREQKISDTEREFEKALRPLAFDDFNGQEKIIENLRVFVMAARMRQEPLDHVLLHGPPGLGKTTLANIVANELGVGFKITSGPVLDKPGDLAGLLTSLEENDVLFIDEIHRLSPVVEEYLYSAMEDFRIDIMIDKGPSARSIQIELNPFTLVGATTRSGLLTSPLRARFGINCHLEYYDHAVLTHIIERSAKLLCVPCTHEAATEIAMRSRGTPRIGNALLRRVRDFAQVKGSGSIDLEIARYSLEALNIDKYGLDEIDNKILSVIIDKFKGGPVGLTTIATALGEDPGTLEEVYEPYLIKEGFIKRTPRGREVTDLAYTHLNRRRISEQGTLFMKLVLNPSYCQLRNFVQKLPISFPTLGDCIYKARNELRKFSYEGQWYVVKNYKVPLFINRIAYTFFRPSKASRAYEYALKLRSMGIETPAPVAYIELKSGGLLQHSFFVSENCSYPRMMREFEEGGIAGREDILEAFAAFTVDLHKKGVLHLDYSAGNILFDKQEEGIVFSIIDLNRMRFIPMTPKMCLANFNRFCRDESVVRYVVGVYARLRGWDEVTSIEEALRAHREFWVKIERKETLKRRRESSHSLKMPYRKVLIIRLSALGDVAMTIPVVYSVCRAYPETTFVMLTQKVASQLFINAPRNLQVVVADVKGRHKGFVGLYHLAREVRRLSIDAVADLHDVLRTKVLRFFFKLWGIRVAVIDKGRKEKQELTSRRAKVLRPLRSSFERYGEVFVSLGFSFVPNFVSLYDEGVGDEGLYSELTPPKSSGERWIGVAPFAKHKGKIYPLDCMEKVVSKLSEESRVKIFLFGSGDREREILSLWRERYPGVISLADKRYGFAVELSLMSRLDVMISMDSANMHLASLVEVPVVSVWGATHPYCGFLGWRQSDSGVVELPLDCRPCSVFGNKPCYRKDYACLEIAPETIVDRVKSLETLIKEKMNFAETCNRIFWNTTQYYHRFDQVDAPLENPYSEGSIEYYLCLKNWIDVVQWHLEDIIRNPEIDPEEALAIKRRIDKSNQERTDLVEMIDDYFLQKYANVEVKADATINTESPAWAIDRLSILAVKIYHMQQEVERKDASPEHVAKCREKLRILLEQRADLSMAITQLLDEIESGKKYMKVYKQMKMYNDPALNPVLYKKMNTIPYIVADNKIPYLKGILEPYARIDYLSPERINAQTVQDADILLIRTRTKCNRELLDRSRCRYIATATIGYDHIDTLYCKEKGISWQNAPGCNASSVGQYVLSSLLAWSKSTRKNLQDCTIGIVGVGHVGKIVARYGKLLGMQVLLNDPPRQEAESETDFVPFEKICREADIVTFHTPLTHEGKYPTYHLADTDFFNALEKTPLIINTARGEIINTEALKRALKQKKISSVILDCWENEPNIDKELLEQAFIATPHIAGYSADGKSEATRMIVQSVGKWIKTDIPTQNIVPPAPVREIIDLSGAANPLQQAVWESYNPFDDDLRLRKSPETFEMQRGLYPLRREFPAYYIKGIPPTGSPILENLGFHIVMSDVASTVKEIIVEKLGVKESEVTPEANFTNDLGADSLDTVEMIMEFETKFDIKIADDQAEKITTVGEAIAHIEKAIAEKMELKRVVVTGLGAITPLGNDVPSTWAALLEGVSGAGPITLFDASEFKTQFACQVKDFDPLKYFNAKEARKLDRYTQFALAATQEGIADSGLDLETVNKDRAGVIFSAGIGGISTFEQEVGNYAVAPEKGPRFSPFFIPKMIADIAAGQISMIYGFRGPNFGIVSACASSTHALIDAYNYIRLGKADFIVSGGAEAAITVSGVGGFNAMHALSTRNDSPETASRPFSASRDGFVMGEGSACLILEELEHALARGAKIYAEIVGGGLSADAYHLTATHPEGLGAKLVMQNALDDAHMAPEEIDYINVHGTSTPVGDKSEAKAILEVFGDHAYDLNISSTKSMTGHLLGATGALEALICVKSIDDSIVPPTINHAEGDDDPEIDSKLNFTFNKAQKREVNAALSNTFGFGGHNASIIVKKFTKMLRHKEPYVLYRKLLGFYPTDIHLYEQACLHRSSSICEQGRRINNERLEFLGDAILDAIVADILFHKFKTSKEGFLTNTRAKIVKRESLNEIAVKLGLDNFITYSMRTSSHNNYMFGNAFEALIGAIYLDKGYRYCKKFVETRIIDPYIDLEKISKEEFNFKSRLIEWGQKHKVDIEFALIETIVDQDNNPVFQSQALLGGISGGIGIGYSKKESQQNAARIALNRIRRDKNYQQSVLATRENGNNTIVTMNPTKLIRSIFAKRLSQIDRYADYGDIIQQKTLLDLLQKAKNTEFGTKFKFNDISSYKSFAENIPINGYEELKPYIERTMSGEQNILWPTPIRHFAKSSGTTNDKSKFIPVSAESLRYCHYQGGSDCVALYLRENPPSRFFSGKGLILGGSRAQNPFGKAYCGDLSAILIQNINPLINLIRVPSKKIALMSEWDTKLEAIAESTIDRDITNLSGVPSWFLVLIKHILKKTGRQNLTEVWPNLEVFFHGGISFAPYREQYRELISNPDMHYVETYNASEGFFAVQNDLSVAGMLLLIDLGIFYEFIPLGKSNEHAVPLWEVEAGRNYEMVITSNGGLWRYRMGDTVKILSTNPLKISISGRTKHYINAFGEELMVDNAEQAIARTCAQTGASVLNYTAAPVYMTDHSKGRHQWLIEFGELPVPVEIFAEKLDTNLQNLNSDYEAKRFKSIALECLEIIPAKTGIFDAWLRDHNKLGGQHKIPRLYNRRDIIEEILRYNRMKRWSLPVALAVCIFLKFILFDVIWSSDTTFQSFSQPESYLIKGAIALLLAFPTVFFRSRWYAGIVCFLLDILLVANLMYWRTYYTAIPWNSYFLAGNLADFMGSVYASVRWCDGLFFAMTLGLLFYTSRYGDLRSSRSETKRRAVWFAAGFLICVVATVGLTFARGGFQRSYEKRNTCATPTFTVFGTLCYEFVKESMSITPEIHSEIERWLSATSRSYPVSGVEHRKHCVVILAESFEGWMLERNVEGKEVTPYLNRWLKDSCTLYAPRVQTQVRGGRSIDAQLLVNTGLLPIANGAYSIRFPNHRYPSLAKALKQACGEKGRMVGMTSDKRIVWNQQGVAMAFGFDRLYDEKSFTKEERMGVKKRVGDYPFLQQCAEKIAEEIAGSGDSSRCFFQLVTYSGHGPFIIPDEYKRISFSPGMPEVLNNYLTAANYTDYAIGKFIERLQEEGLFDETMIVVTGDHEGLAYLRQSLCETKEGGGLVSPFEYTPFIVINSPVGMRYEKVMGQVDIYSTLLDLTGLDDYGWKGMGQSILDPSHLGVAAIWNLTIAGDTTGICPEAIERMKQSWRISDLMIRGDYFRSDFMRNFIYAIGVCSLLFSCNSELETLPEEFNTEGTAPLVTRVAAHPKYGVLGWGYDVTGNYMSHGKGVTLPVIDIDRFEAENFDRIVLDSSTSQETEYYYGTTAEEYLKRVGDNVDTGVDAKKALFSLTITGNYQKNTSYSSEYSFAGCDHYYSLKRCYIRAAVERLQNYLSDTFREDLAELPAEDIVDFYGTHVLADIRMGGRVSFLYKTYAGKENVEAITKAGFKVDVLNLFSIGNEYQVNTSLAVNNSRQLATINVTGGTDALLETFDPIKEQPRFGSVADWQRTVNADNAGLIDVELPRLIPIYELAADPTVKAALKEAVANYIESKRLKQLFPLYEYFRANKMDHYATSVWQGLANGLWEYQGVIGYVYLGPEPGTIPLYLYYNKKCVNHYCTPVYQGEKKGDYVLEGITAYIYEKQEPGTVPLYMYYNGRRCDHYVTIVWQGNKKGDYVYEGNAGYVYPMRIKDFVKCNLNNLFYREYRLRRKVRRHLLPYYKEAFPVGKNTNKMIVFMADGRKSHGGLADRLRGIVSTYEYCLNHRVDFRIHFTSPFNLEDLLLPNEYDWRIGAGEISYNPTFSTPVYIDSNSRYPEADCRFQRKMAEKYLGRDFRQIHIYTNMYYADDRFGLLFNKLFKPAPILQSWIDENLQILGQNFIALSFRFQNLLGDSVDGKIVYSPEEQRELINSCICQIELLRKTNPDSKKILVTADSGSFLKEVSKLDFVYLLPGKVGHMDSTSQQDIQVHMKTFLDFFVLSHAKKIYLLITGKMYKSGFAKRAAKLNNIPFEEVEFMDNIFYSIRNGKNPKYSYYLKSYFLRLLPLKAICRKRLNKILAQVDTRSDKNYINDRVNYYNRLIEPVKLPEGSPHLNELKLQKKGKVYYFDSFEYLRYFPENLQWNYCFGDINFMPDTPSIVKSRPIHNQSANAILLNLNKVRHFIFVKDKIPFEKKMDKVIFRGKVNEGKTKRIAFFNKYFGNPLYDLGDTSRNGNPAWRTGKKTIAEHLRYKFILALEGNDVASNLKWVMSSNSVAVMPRPEFETWFMEGRLIPNYHYIEIKPDFSDLEERIAYYTAHPDEAIEISRHANEYVSQFFDKKREKLISLLVLQKYFRKTGQLEQMEIEKLQSLSDEILDELLIVWEKSVRSSHHFLKEEDIEYFKPLIRNQYFPAVKLFVIRNENGRIAAFMGLSDDMLEMLFVLPEEQGHGYGKAFVDYAIDKCNIYKVDVNEDNEQAYKFYLHMGYEVIGRDELDPSGKPFPILHLQQPSSHMEKNFKRTLVTTALPYANGPVHIGHLAGVYVPADIYTRYLRLKGEDVIMIGGSDEHGVPITIKAKAEGVTPQDIVDRYHNIIKKSFEEFGISFDIYSRTTSKIHSEMASDFFRKLYDKGEFIEKTSMQYYDEEANQFLADRYITGTCPHCGNEHAYGDQCEACGTSLNATDLINPKSAITGNQPVLRETKHWYLPLDKWEPFLRQWILEEHKEWKPNVYGQCKSWLDMGLQPRAVSRDLDWGVPVPVEGAEGKVLYVWFDAPIGYISNTKELLPDKWELYWKDKDTKMVHFIGKDNIVFHCIVFPAMLKAEGSYILPDNVPANEFLNLEGDKISTSRNWAVWLHEYLEEFPGKQDVLRYVLTANAPEAKDNDFTWKDFQARNNNELVAILGNFVNRALVLTHKYFDGKVPAAGELTDYDRETLKEFADVKAEVENYLDHYRFRDALKEAMNLARIGNKYLADTEPWKLAKTDMDRVATILNLSLQITANLAIAFEPFLPFSAEKLRGMLHLGHCDWNMLGRTDILPAGAELGKAELLFEKIEDSVIEAQVNKLLETKKANELKNHKAAPIRENIAFDDFMKLDIRVGKVLECQKVPKADKLLQFRIDDGLGGRTIVSGIAKHYAPEDLVGKNVCFVANLEPRKLKGIESQGMILSAEDADGRLIVISPATDEIAPGSEVKMPFYLIIYRMRWIVFVLLPCRVQWHCGELCKQYREETEETVVPEERAMGRPLFSIITITFNAAGTLPATLKSVERQTFTDYEYLIVDGASTDGTVAIAQHSAAVSSVTSEPDKGLYDAMNKGLRKARGCYLVFLNAGDAFHEPDTLQKIADSIEKNDPDIVYGETALVDSERRFISMRRLQAPERLSVKSFRMGMLVCHQAFIVRREIAPEYDLRYSFSADFDWCIRCMQMARTITHTHEVLIDYLNEGVTTANRKASLQERYEIMCRYYGTLPTFLRHLWFAVRFAFARFSGREMRDLTRLASRIVMFFMQFYYRLARHSRVSYKAYIDGRTRLAGYNTIQDNVLLAGARIGRGTYICRGSNFTDAEVGAFCSIGRNVRIVNGQHPTRTFVSTHPAFFSPNGQPGFSFVREKRYEDCRYLDRERRVSVEVGADVWIGNNVSLMSGIRIGTGAVIATGAVVVSDVAPYAIVGGVPAREIRKRFDDEQIAYLLASRWWERPFDELRKEADSFSDIGLFMKNGLMELAPIVLFVYNRPEHTRACLEYLERNELAAESELYVFADGAKQGSEEAVAAVRRVIAEPWKFKRLNVVERPENKGLAANVIAGVTSVLETHDRVIVLEDDLIVSPYFLRFMNEALEVYKDTEEVCHVTCHMLDHKGELPDTFLIRWCNSWGWGTWSRAWQYFEPNGRKSLQEIERRDLCRQFDLDGGFHFTQMLRDQIEGRNNSWFIRWYASLFLCDKLMLGTGRSLVDNAGFDGSGTHCNTMQLCTQTLSMNPIAVVPISPVKENLLARKVYSRTYRYNYSYRHKLKVFIGNLWIRVFNRKKRMNEVAVARPRVLTVIVSYNFEPWIERCLSSIRDSDYPSDLVVIDNASTDRTVSIIAERYRWIRLVRSRKNLGFGQANNIGMRMALEEDYDYVFLVNQDAWIEANTVGTLVGLAEKYPDYGVLSPVHLDGKGEHLDGSFAKYVGGASAVSSKKSDIVEAAFVNAAFWFIPVSALKKVGGFSPLFFHYGEDVDYIHRMRFYGYRVGYTPLTSGCHDRQNRPITRQTQMKLDRVYYLSVVSDLNSGMAKCLWGGVLAPLKPGVLALLRGRFKEFCFYTGTSVRLLCRYPSIAEIKRFCKQGRPVFLENVHSKIKPIWSMEENLKRKTTKALVWSTADKLGQQLFYLVAGIILARQLSPEDYGKVGVLTIFIALSGILIDSGFSSALIRKKEATQADYSTVFYVNVAISCVLYGLLYAAAPYIAVFFKVPDLIYICRILFLVIPLNALSLIQQTLLLKHFKLSVSARVNLWSLGIASVVAIAMAYGGMGVWSLVAQTLGLSFFRAVFFWVFNDWRPRWIFRMASLREFFGYSSNLVVSGIINNVFNKIYPIIIGKFYGMTQTGYYTQADKYQDIASSLISNIFRSVAFPVFSKVQDDLQRLKRICRKNVRAIAFFIFPIMLLMVVVSYPLISIMLKEQWVPSVPYFRLLCFSGICSPFIILFFDLFNSLGYSRLNLQLEIGKKIYLFAGIALFYSSGILWLIGWWISYSVLSLAASIFFARRFLGYGFGEYVKDIFPYFILALASAILSCGVYLLLPSDLWRLCLVPVVYVVLYLGGAYMLKLEMLQEMLSMLKSRVKRGGEAMSAEANGNLVSDLTMPNRNPIFVCTKIAKVESKKLNRAMQIVRIVILTLCCLVFATAKAQIDTQFSQYWALPGYYNPAAAGSSDKLNILTSTRQQWIGMPGAPQTYFVTGDMPFKFLKQNHGVGLVVTSETEGLYSHLILGAQYAFKIKLWKGVLSLGIQLGMLDERFDGTQVSIPTSDYHQATDDGIPTTELQGMSFDMSFGAWYTHPWFYAGISVSHLNEPSITFEDKYETYIGRSYYFIAGSNIPIKNTLYEVQPSMMVKSNLNITQYELSCRVKYNKLFWGGLSYRWKDACIFMIGAEYKNFIAGYAYDYPVSAIVKASSGSHEVFLGYSLKLDLSDKNKNKHKSIRIMMKKIIVYITLAILVAACAPSSRHSGEVTGVGGTAWNEPTPYGMVLISRGSYKMGPAEKDSIWGTQQEPRAVSIDAFWMDETEITNSKYKQFVFWVRDSIIRERLADPAYGGNEVFKIEEDREGNPIKPRLNWDKAIPWRNPNEDEARAIESVYRINPITGERQLDASQMNYRYEIFDHTEASKRKNRLDPARRDLNTDHTPDYDEIVMISKDTAYIDEDGRIIRETITRPLGSEFDFLNTYIVNIYPDTTVWVNDFENAYNEPYVRLYFSHAGYNDYPVVGVSWEQANAFCAWRTALLKGSVGRNAVVIEPYRLPTEAEWEYAARAGKNENKFPWTGNLPMAEKGCFYANFKPDDGNYVKDGNLITSPVGSYSPNEFGLYDMAGNVSEWTSTAYTEAVSQNTSDLNPEYKYNAAKEDPYRMKRKVVRGGSWKDVSNFIRSDIRMWEYQNEQRSYIGFRCVRSQIGFAKAKRMGKYKRYKNSIEKFLSSDKGQRFFNFAYSIGAAIVIWGALFKILHLPGGSLLLSIGMGTEVLMFILSAFDTPPKTYHWEEVFPVLNSKNPEDRPEFSGGKGTVIIGGNGKGGGSNGGNYSDVTPSDAKRAVGIPEGLNLSDADTQSLTDSIQKMSAAADQLSRMAELTDATQQYLTQLSGIAEQMEQLRSATESLTAVSNTLLQSYRNITENSEGISDTSQGYVSGMETLNRNISGLNTIYEIQLKSISSQLDNIDRVNNGLKNIRDMYERSASDSSRYCEATEKMTQYIQQLNSVYEKMITAMTINMYRPMGGAPVEMPEKPKDDTEQKMASNNNRLTPRQKMINLMYIVLTAMLALNVSSDVLNGFKQVEDGLERSTSNASLQNDVLYQKLADFNSQNPEKGGSWYKKSLEVKKQTALLYDYIDSLKNVIVKKADGKDGDVNNIEHQDDLEAASYIMLSPAQKQGMKLRKEIDDYRNLIGSLMTDSIKRAAIENYLSTTIHSGNRTQAPSMWETTLFENMPVIAAVTILTKIQSDVRYAESEALHTLINNIDEGDVRVNQLNAFVIPNSKNIMRGGKYSANIVLAAIDTTQRPAIYINGKQLPPENNGLYEFVCGSTGIFDFQGYLEVPRGDGSMTRHEFSSSYTVVEPSATISATLMNVLYAGIGNPISISVPGIPNHAIQATMTNGSLTRQGDSWIAKPAKVGQDAVITVTATMDGRAQTVANTQFRVRQLPDPMPFIAYKDENGYEQKYKGGKPFPKTRLLSAPGIQAAIDDDLLNVTYRVLRFETVFFDSMGNAIPEVSDGANFSQRQKDSFRRLSRGKRFYISRVRAVGPDGIERDLSPIEVIVNMKYNSANMNTLIKSCLTLCLLWSAIGSHAQVIKKSDTDDSKKTTNQLSVRAQSLYDTQDASDADIPWMRVIYRQIDLNKEKNMPLYYPEESTENQENLFRIVMKLLANNQIPAYEYLDGREIFTDEYRIKVKEMFDRFHILYAPAKGYSEKNPRFTVEESDIPSNEVLSYYILEKWIFDRRTSQVKPSIEAICPVLHRTGDFGGEAVKYPMFWVKYNDIRPYIARQYILASNENNVQQYNYDDYFQMRMYEGEIYKTQNLRNQSLMQMYPNDSIRKQAQDSIEKQLKNFNENLWVPSPEEIAKAKEEQAAKEAKENGETLDNDKQKKEKSRTARSSRAKKQKEAKVKKQKQPKQKKSSAAPVRSVRRTRMQMPPKSTDTNLNPQTQEHFLLSFERPASSSEDNTLLTSSGKLTIVLCTRGCKTVQLNFTEYVLEPGSIAFLYPNTIWKPIKTSSDFQARYLSMREHSPKERNAFLDLETIFSLSTYIARHPHTSLSANESIVVEGYFRLIQNRYEAHVNYAIIRSLISAFILELNQMFAIRVERKKLKISRKEDILWRFLSLLTQHYKENRSVDFYADKLCISPKHLSSVIKQLSHKTAHEIISDVVIMAAKQLLKTTTLSIQEISEELNFANQSFFGKFFKQNTGQSPSSYRGEMKNIVLFLSAACLLSAPIFGQQQENRFAEITDPQLLSINKLPPHASFTSYIDETSALNKDKANGSFYLPLNGIWKFHYTEKFKERPMNFMEPDFNTADWKEIKVPGNWELQGFGDPIYVNVGYEFVSPGFDKYLQEPNPPMVPEAWNPTGTYRRDFALPANWKGKRIFLSADAVKGAAYFYLNGEFIGMSKAGKVPVQFDITPVVKPGENTLAVQMHRFSDANYFEGQDFWRLTGFERDVYLYAQPQSRIADFEVQTPLDSSFKNGVFKLDVKVQNDEVKARSISVSYRLIDHAEQTVAHGEKAIKLDKNSSQSVSFAETINDVKAWTAETPNLYTLLISTADETGKIEECIPSRIGFRTVEIKNKQLLVNGQPILVKGVNVHEHDPLTGHYITEETMLKDFELWKKYNVNTVRTCHYPQQKRFYELCDEYGFYVIDEANIESHGMGYSLQTGGSLGNNPLYLPAHLDRLKDMVERDKNHPSIITWSLGNEAGNGYCFYETYLWLKQRDPSRPVQYERAEHEWNTDIVCPMYISPKGIEAYALNPKSHRPLILCEYAHAMGNSLGNFQDYWDIIEKYDLLQGGCIWDWVDQGLEKTNEKGEKFWAYGGDYGDTGTPSDGDFCINGIVYPDRKIKPQTIEMGKVYQNIKFKNFDRTKGTIEVQNEFFFTDLDKYDFAYAVKGNGKVLKTGKFTVSLRPRQKCTVTLNGLPNMDKETVDYQIEFEARQKKAEPFLPQGYVVAREQISVKPAVKPVAKPDQGVVSQTDNGDETIFSGKNFSVTFDKNSGLITSYRYKGTEYILDGFGLRPAFWRAPLDNDYGYNSPKLLGKWKEASQQPPVARSFSIDKKENDNVRVVCRYLYPQTRSEWEISYTIFGNGVIKVDNTFEVSDPQAPMIPRVGLRMQLPDSFTRLEYYGRGPWENYIDRRTSCFIGRYEANIADLYEPYVRPQENNHRTDVSWFALTGKKNALLIVTDSLLEFNVSNYPLESFDSGDHRDDGRQRPENPGQRHNCDPKPAELVDLFIDYRMMGLGGDDSWGAQPHEEYQINLAPGKISYGFSLIPLDKNANFEKAIKQYMSRLPKLSLLVSLLFLSSCSLFKELSSDDVTRITSEYFDENHDMVFYSTLSLLQAEQFTIVQADKESGIIRGTRHIERDDVERNLKTFGTATERESTEAVFLILPLSDKRTEVKLSLYRNELTVTRKNEVNQKQTSHTMLLKESTYDKWLNKLKAEVKRRKKLVMFLYHHAINECVTCFYFVEKTMETQEQKMVEQLSMRRMEIEMLRCEVLFRYYERLLGLDVINDRDEVKSVMTCINTLERYARKYEKKFEELFANQKEAMPEVAVSESDSPKEANRVADIDMDREECELPDIEDREQSQVPLVAPASLLRNNQECSDLSTINHVSHRAVDPIVKLKKQSSKKVRRKRMFELNKYEKQVETNISICFILMLMSDLGTAVAWVGLAACVILFGQLVYYPFRCKKKDEYLFVPWWILYLLYWCIFTYWTVHNLVAASMKKKSKSVIRLKYIELIAFMETWLAGLCFVVGIKWLIGLSIALFAIPLWGLISHRRWCRAHNEPYANWEFFYTVIAWIVYIFITLVIYFHFFTMATAYHNLSSYDADTMPDASGMKVAIAAAEWNAEITDALLKGAVDTLLRNGVKEENIYVARVPGTVELTFASQQMAEFYQPDAVIAIGCVVRGDTPHFDYVCQSVTQGITHLNTLFGIPFIFGVLTTDTMQQAKDRAGGKLGNKGDEAAVTAIKMHDFVCKLKMAEKEKDELEKMNEALSMSEQFVEKYQKPLLLGLLVVVVIVGAILGVRHFYLLPREDKAQAAMYQAVMAFENDSIDLAINGNEKFDGLLTIVDQYGSTAAGNLANAYLGLAYYEKGEYETAQKYLSAFSADETVLSPAVTAAIGNCLVDMEKYAESAKYFEKAAKESDNAVFSPIYLKKAAAAYEKVGNNEAAVKLYQEIKDKYPTSNDARGIERYIERAQNKMILSRLSIVNFKNIAQADLSFSPNINCFLGNNGMGKSNLLDAIYYLSFCKSYTRNPDSQNIRHGEDFFVVQGYYERNGNEEELYCGIKRRQKKAFKRNKKEYDRLSDHIGFAPLVMAAPSDNELILGGSEERRKFIDLVISQFDKQYLSTLIRYNKALEQRNALLRQECSEEMLYDIWEEQMDSTAAQIHNSRDRFLQSFIPVFRRFYNEISSQNESADLIYKSHLSEGALLPQLKANRHKDLILGYTSRGIHRDDMDMMLGEYPMKRIGSQGQCKTYLIALKLAQYDFLREQGDTTPILLLDDIFDKLDAERVKQIVKLVSSDHFGQIFITDTNRKYLDEIIHFIGSQYNIFSVDRGEVKILEGKTPMKKQDALPIGDIISQFISEKNFGQKLDETQVMRLWPRIAGETVNSYTQSMYVHNRTLYVRLSSAVLRNELTMLRNELLTRINAEFGHRVIDNIIFRMETTSPAFRHTLPLQLRFNDIDLLGHVNNSVYFSFYDLGKARYFETVKAQNIDWKKADVVVANVNADFLSPIYPGEPIAVQTCTVEIGNRSFKLLQQIVNTETGQIKGVCHTVMVGFDITAGRAAPISDEWKEALCRFEGKELRKKMNFTEKIEEILQKEAQAILDIPVTDQFEKAVELIVEQVHRKGGKLVTSGMGKAGQIAMNIATTFCSTGTPAVFLHPSEAQHGDLGILQKNDLMLVISNSGKTREILELLQLASNLMPELKFIVITGNNRSELAQRADVCLFTGAPGEVCPLGLTPTTSTTLMTVIGDILVVGAMEATHFDAHQYALRHHGGYLGTRSREQSQNKMRKIIGIGETILDIIFRNNQPSHAVPGGSTFNTLISLGRLGVPATFISEIGKDTVGDIIIDFMKKNGVCTENLDIFCEGKTPISLAFLDENNEARYMFYNQFPEERLNFVWPRIEKDDIIIFGSYFALNPALRKKVCELVEFAKERKAIIYYDPNFRDAHAHEAVKLMPSVLENLEYADLVKGSADDFNNLFHVTDPQKIYTDHIKFYCPNFICTLGSKGVKLFCEKGDKHFATTPVTPVSTIGAGDSFNAGVLFGLLKHDITLDKLYSLTPEEWEPIVRYGREFAATVCCSMDNYITPEFAANYITPEMRYLQLCSLLLALSACSTHSPDIDVACEIDLQNNYLLKWETTPRIEGEVQVYRSTDPEHFDTAKEPVATASIQTGYTVVPDSLQTYRYYFLLRFNDRYDRIVGPRAERLKYIENFRDLGGYETKNGKQIRWGKIFRSGEFNSLTANSINRIKNMGIKTLIDFRDSEDIIKTSPELGFDNVINLPGSLHYRQNLLPRLEKEELRRGDANLFMQDLYVAMVSGSKRAFKSMFNQLLVEDNYPIVLSCINGKDYTGFAVSLLLSALDIPEDVIMNDYLLSNRYFDKRRTSFDPKNCCDETQEALSLIQSADSRFLSYARDYIRQQHGSINNYLEEELGLTPEKKRQLKHLLLHMKTFQELGICDEILKAITELGYENPMPVQEQVIPHLLNEETDLVALAQTGTGKTAAFGLPVIQRIDLSLCKPQALILSPTRELCLQIASDLTDYSQYVSGLRILPVYGGSSIESQIKTLKKGVHIIVATPGRLVDLIERRTVQLDHVSTVIMDEADEMLNMGFLDSINAILSKVPQERKMLLFSATMPKEIEQIARTYMHEPKEVVVGSRNEGAENVRHVYYMVHAKDKYPALKRIADYYPSIYGIIFCRTRRETQEIADQLIADGYNADSLHGELSQTQRDAVMQKFRLRNLQLLVATDVAARGLDVTDLTHVINYGLPDDIETYTHRSGRTGRAGKSGVSVAIVHSREKGKMRAIEKIIGKKFERGMVPTGEQICEKQLFNLADRIEKVKVNEEEIAKYLPNISRKLGWLTEQDLIKRIVSLEFNRLIDYYRDTPDLDIPDENTRKPKEGNFAKEGRNGRKKDIRTAEAGFERIYINLGKAHGFFPPNLIEMVNSLVPGRVNIGRIDLLSSYSLFDVEKSSAPKVVGALKGNEFYGHRIYAELATDKDYSAPKGKRKGKEEGGRRTNEKRYGNSRRDHSESRSRRDRSSSKTKRNSHSSKKKKGMVTDKKFIAKFRFIPHRFLLNRTQMKISFLQYKRKADQRLAGFSYGDRVYIMALSLYSLTGTPRNAMEHGKGKREMHHFAPVIESINTSPLCFAQQNIGEKQRSGSDDERGWKYGIMNIIQKIKLNNPEKENLQKTLYEIDTLSKRWTGIQKSGESDSEAIQKNIETTISASLSLENIPYTALQIQKIIARQKATNDKKQSLITGYDTVLKALYTHPHNYPLLEDTIVTIHAALFPNGKIHSNDEPAGKPSVVNFLDYKAPTLFSRNQAVSVNNEIRDLVEWTNDELSKHEHHALVIIAAFAYEFISIHPFREGKGELSRILSTLLLLQNGYEWAKFESIDNLIEKRRTEYYGTLKEGQQNRYSSREDISAWILFLCDIWLQSIRNLVPAPLTETPPTLDSTDIPLRNKNITSHSTEPGNPPVYLNTRQKRILSFMEDEGPVKVSDIAQALKPVSINTIKKDLLYLRQQNFVEIHGVLKGSIYTLKKMKKILVIGATGQIGSALMTKLRKEYGNDNVVAGYIEGVPLSDELKNGGPLEIADVTNAQQIAAIIDKYKIDSIYNLAAILSAQAEKRPLLAWNIQIGGVLNLLEISREKGCSLFTPSSIGAFGDSSPKMKTPQETIQRPRTIYGVSKVSCELLSDYYFYRYGVDTRSVRFPGLISYETLPGGGTTDYAVEIYYAAVKGEKFEIPVKAGTFMDMMYMPDALKAMVMLMEADPSRLKHRNSFNIASMSFDPEIIYNEIKKFYPDFVAEYRIDPVRQQIADSWPDMLDDSCARAEWDWNPDYDLESMSVDMIDHLKKKLLKMFTQMKDHLAKQLAEIKANGLYKVERTIITPQSSAIRIAERSGKVLNFCANNYLGLSDNPRLISAAKKAMDSHGFGMSSVRFICGAQDLHRELEKAIARYFHTEDTILYAACFDANGGVFEPLFTEEDAIISDALNHASIIDGVRLCKAKRYRYANADMEELERCLQEAQAQRFRIIVTDGVFSMDGNVAPMDKICDLAEKYNALVMVDECHSAGVVGPKGRGVSELYNLYGRIDIHTGTLGKAFGGAIGGFTTGRKEIIDMLRQRSRPYLFSNSLPPAVVGAGIEVFKMLDESDELHTRLMENVTYFRDKMLAAGFDIKPTQSAICAVMLYDAKLSQSFAAQMLDEGIYVTGFYYPVVPQGQARIRVQLSAAHKKEELDACIKAFIKVGKNLGVLKMEYPPPLCFATQNIGEVTRSGGGVGFYQKLFSYFFTVHRGDRNVFVDKKYIAEIHFHPMNFLLNHMNRLMRYRFQPLRHFLSSPLLASAIPRNATGHGRGEWGQFQFAAMSQSTTGRGLKVLLRTLFPPALCGYLPSLLLLRNIGETQKKQSFLRKGIRGIKRQSPLISYMKTNRVIKIFLASSEELEADRYRFGNLIRKLDNIYEKRGIRIELFEWEDYDAAYNGMRKQDEYNERVRASDMFLALFHKKAGKFTIEEFNIARKAFDEQASPKIYTYIKDLEAGESESRELAEFKRLMLEELGHYWCRYSNFDTMQLHFVLQLQMVEATTPIKVEVKESQVKIGDSTIADLNNVPFTSENATHRELQSRKEQLDREIGNAESGGRRGFFGQRSRMTDEELANLREERESVTEQIERQEKALVDTAMSIARMQGGECSPRMRTAAELFEKGEIDKAGAVLKEDDMEADATNAKLKFDTAAQPTAELTRNIERCAGEYMLKARIVVSGIADESRYRQAVKLMSTAIDLVSGRLPEETLAEYLFDYAVLLTDVGQQTKALETWERLSGIYERLYRKAPQKYAYGYAGVLNNMAVLYSDKGDFDHCLSKYLKAVDIYDRLDREGPGIYDDDIARLKNNLGTLYSDRDEYNKALSEFNEAARIRFELLAKDNDPDSRSALADIYCNMATALQFSDHPQEALRYIAQAHAILDELDKEFPRIYEYKLYSILNREGSIYTRLDQLDKAEESLQKSLQLAANLASRMPLAHSADLATAKMEMSGLNYVLGKNEEARKGFRQALDIFRRLQTNEPVYDHQIATVLQNLGVICRHEEKYDDAEKFLKEALDIRERQHAQAPYSFTADHAKVCRDFGDLLVDMGENDRAGEMFEKAATLYTNAAEKSGHLKVSIADSIYAWADTRLDSEEYDRAESLFKQALSIYSRLTDDKTSYDMARTWSRMGDLYMLWEKPQAVPSYEKALSMFKELHAPDSDYREETAHITNCMALISSANEEYDRASELYEECISIYESLCNDGHDNRADLAEAYCSLGETHCNLEAAEPARECFEKSLKLYREINACPVPLHIDKMAVVLKKLGIVLYVCEEYDTAITLYLEAYELLNAIYRKTGECGEELGSVALCLSETFADTGKARKARKYYDIALKFGAIEEDEEEDYNDDKDEEDEIDEDMEEDDEDGECEESNETDEARTIEDIRIAKKNAHRFKTASDYLEAAKCYTDKGDLQKAKELYIDAINICEKYLVGGFTEDTYRVKAECCRNFADIIKEEGHLENAMAFYQEALRIYKILKFYSPDYEQALSEVERRIKIFTMKKGLGLLMPLFLMACSQQATISKDTLKDKIAGGWAGKMIGVSYGLPTEFKALGKMYEDSIHWAPVRVKDALWEDDLYVQLTLMDVMDKHGMQAEQKKYQEALATAGFRLWHANVQTRKNYFDSIFPPQSGQPEFNLHADDIDFQIEADYIGFMCPGMPQTANKMADYMGHIMNYGDGVYGGAFVASLYSEAYLQNDIRSVIEKALLSLPDESGYRRIIEDVIAFHQENPDDWTKCWQMLEDKWARANICNPGTKYNIDAKLNGAYIVIGLLYGEGDINKTLEISTRCGQDSDCNPSNALAVLGIIKGFSAFPQEYREAIEKIGDKPFVHTNYSFNKAVERTADYAEKLIVENGGKVTENSYSIVLQEPVALPMEDAFPNLVYSKRAAIVDADKDSCWTLKGNWQDAENGYVKYSEQAGDEITFTFEGTGASIEGWWVKNGGKADVYVDGIFKRTIDCFYYYAKQEHRNINIFHILNLEEGKHTINIVVKGEKREESEGCAIGVRGAVVYKNGTKSYDAIMQSTRNATGHSKGEGKIFKVTFHDTFRSPCITRGNEIESDAPKDKTGGTSMRKSVQFLLLFLMCISASWTWASDAPERTVLFNMGDYDSQYWRIPALVTAADNSLVAVVDKRGSSLGDLPNTISIMSRRSTDNGKNWSEPVVVAQGGNGKTYGDPAVVLDKKTGNLICMFVGDQGLWNATPSQRQGIYVSKSTDNGVSWSEPVAITDQVYANHSSWYAGFAGSGHGLCLKDGRLMFVLAIRATSATGVPLHNYAIYSDDGGDNWTLSTNAATTAGDEAKVVELENGDILMSIRNPSKGNRIFCKSTDRGQTWGKAYFETELKDPACNGDIIRYSYSTDEGSEGKSRLLHSLPESTTTRENVTIYLSEDDGETWPIKKRLVDGYSAYSSLTVLSDGTIGALVEEGKWDSNLPGEDGFQLVFYRFTMDWLTSDVTEPPVVSEGTLQLNGTDRYMRIPSADDFNIAIGESYTVTCKVKMPFSGSSCRFVSKRSYTGTANSGTVGWEMWGDMNASTRFSTNLSPAGSPWGGKGNGTGVTFTENQWVHLTWVFDWNENTTNIYVDGVLGESKSLHADFQSKSLENNFDVLVGAGYSNSDGSASVPSFFMNGEMDDLRFYNKALTLDEIKADMDATVDGTTDGLVAAYDFTDISGVEVPDISGHGHTGTLVNFPNYSTLYTVTIAAPDPEQGTLKVMNGSTEVVSGTGIPENTRLTVVAEPADGYQLKEIRVNDVALERNVNIFTLTQETTVTAEFEEAVPAYCTYEGNSSHDQRYVRSITMNGGTSPFSVSVYSTTRQAVYVDKTDNVFEAYAGEEIQPVVNWAGEWMHGYLYIDYDKDYTFSYTLGSDDYPTADGELVSYTFYSPSDSQWGKNSKGETTENNSRLDDVPSFTLPESLAPGEYRVRLKIDWCHLDPCGHPDEIANTLTGNGGNIVDFTLRIVERPATYTVTLPETVENGTLTVMNGSVALVPGANTVEENSELTITATPNEGYNLASLTVNGEDITSGETHTVTGATEISVTFEAKPTHTVTYSVVEGEGSIILTSADGTQSYESGEPIEAGTSFRITFDPAEDYKVGRVMYGPSQFGAIMELTLASDNSYTMPAEQFVGNYTFEAYFVYDPETGIAENDREAISARYVSGVLHVEGVTDGEFEVNIYNLTGKLVRTAIETTVDVADLAKGCYLVKVTTAEAEKVVKFIKKMISGNKKNNVSRLRYTHLLSNALPFNSLIRIIICDRFSSLKQVLHSFYFVFHDIKMHFYITPFIMGATTVAAALSDFQAISQTVGTLKGGTVGADNLADELSSDLESQEAVVDKPVTAIVIGAGARGRTYASYSEHYPNSLKIVGVADINTERKEYMKNLYRIPDEHCFSDWKEVFNVPKFADAVIIATPDNLHYAPALKAMAAGYDLLLEKPVAQSIKECTDILKYAKRYDRIVGICHVLRYAPYFIALKKVLDSGKIGELVSIQHMECIRYHHMAHSYVRGNWKSSKDTTPIIIAKSCHDMDMMRWLVNKPCKSVSAYGGLKLFKRENAPDGSTERCLDCPVESQCPYSAKKIYLQRRQFLYVFDIPDNDCKNHKYDSLILDKLRTSDYGRCVYRCDNDQCDHFVASLEFDNNITGAFSMEAFTATGGRLTRIMGTKGWIEGDMKKFTVTDFLTNKKLVWNKDISSLPGYEGHAGGDFGIVKDFVLAVAHRDTSYLTSTIDLSIESHVMGFLAEKSRVLKKRIDMMKLRKIYTSAGILLLSLFCIGDAVAKDAKFETGVSFGSTGADEPYSSLTDKDGNYYISGMCRGDVEFADGATIKGRGGMDAVIVKYDAELNFLWARAVGGSKDDTFERIAVTSAGDIVAVGKISGDVTIDGTDQTLSGTQSTDGCIVVYDKDGNYKSSAQIKAAGASLCYSVAVDKSDNIFVTGSTVGATDFGNEKTVTIEGSNSGTFLACYNNSLVCQWAIAGSSPVQSYGWAVNFDKEENILLTGRFGTTFTITGTDGEALTTAVGSESSQDTYVAKLSHEGVGQWITYVTNSNRIDTRSIDSDSQGNVYIWGHCQSAVTPEGQSPLGFNGNFDSFLIKYSSAGAYLDGMNLGGSGRDEAKSLFVDADDNIYVAGNVNGDGSKGGTAVNMNPRGESKDYTFKGHDGYVAKYNGSTWELMQLEKTVTPDNANQHEVAWCVTMSPDYNKVYVTGYFNNGATVFDGASLTLPFVRDYDIYTVLYSYTLMVKTKTLEPGVANEPYYSNIVVDNVEGAVKFEIVSGALPDGITLSKDGAFAGTPTKNGSYTFTVKISDDVSSIQKEYTLVIKSGEGCDVFIVTDQCPDAYIGYPYSLQLEIEGEGITCALTGGSLPVGLSLSPEGLISGTPAESNEPGICSFTVKATGASGCDDELELSMILSDETPSGINRVSLDSFQVYPTVSYGEITLKADFGKDMKARVAVVTPLGTCVWEKTYYVVQLDEVISTADMQPGVYYLVLSTEEGKSTKPFIVKRMKKIISILLGICLCGGVFAQTQLKIISFNIHAGYDAPIADIAAFIKEQDPDIVALQEVEYYTNRTGANTPRPINNNINMLNELAYLTGMHGMFYVTLEKCYGGKFGNAILSKHSFDETRRIMLPCAAGTEQRNAAIADIKLPDGTEFSIVDTHIDMSKLDNGMSQIKEVNRIPQLGKHYIVAGDMNRRVGTAEINELSSVWTLALSREFDHIGYYPANGWVVKETKVFSDNQLSDHYPIMVTLEFVKMKKYNYFGRVSGWGICMLFLLTGLFTGCSENEEDYPKGQRPAGIESVRKVACIGNSITYGARQFLNDREKECYPALLGNMLGEGFEVANFGCSGTTLLKNGNSPYWNTKEYTNAKAFLPNIVIVKLGSNDSKSGNWSSHGSEFESDLTDLVLSLRSLSTRPRVFLCTPAIAYSNSFGIDDGIITSEIIPAIQRVAEAQNLTVIDLHTALRGYGDLFLDGVHPGLEGNRVIATIIYDVLAKEYSLNKMKTHFKFILCFVGILSITACGSSDPDLPGSGGTGGDDETLVTLAGDRSFSLLSLSAGKGLASGTYNIQPLAAFIQENNTDVVALQDVDFGTARTGKKNLVGEVAYRCSKDGQRRQGIFASTGREDGGETGVALFVRECFYGTNKVNLNDELVLLTVPYELGSGETVLIATCQFDKEDANKRVRQAEALAAYADQVKQNIVICASVYENESGNVFNILKKKYRRSCKFSSENTYPAVQPESRFDYVLTPLSQNWGTQAVQIKGDQTVSDHKALFLRIGLKMKTKYLAILLCAAFVLPGCNDSFLDRIPLDELTDETYWETEEHLILASNACVNYLRGKSRSVDMEFLGDNVFRERSSEYKTLGSGNFTSDLSVINSEWTTDYDGIRRCNHFLENYERAQKVSASVRERYAGEAIFIRAYLYSYLVNCFGDVPRVTNTIDVGDDELYGSRTDKETMIEWILDEFDRAAVVLPYAKDLKDSELGRPTKEAAWAFSSRFALYHERWDKAVSSAEEVMTAGFHKLYDNGNPETTYNELFTLAANPVTNKNNREFIVTRLYSEEANQTHNLSRELQVPNEEARYAPTRSLMDAYLCNGLPITLPASRYRENTHEAIFNNRDPRMAQTILKPGAKWGGYPGKTTYEQPKFSNSATSCRTTTGWYFTKFVELSAISRYNKDQNAIPLMRYAEVLLNWIEAKEMRGDAITQPDIDKSINLLRDRVGADKMVLTKLNAYGLNLRDEIRRERRVELALEGERYFDLLRWKQGDLLAKDVTGMRKSTVPPSEYVYVEDIPTDDKGNLILMTGRTFSDMKNYLWPIPFTQTQRNPNLLPNNPGWEMKSNHFKMRWLCLLFALFTLNIQAQITVDIKNKPLKEAIKTIERSSNYSFFYNVELEGLDKLVTVKTDNASLEETMKQLLKGTNITFQRKVDNVVVLLSKQQQAAKRSRSVSGKVVDEKGEAIIGASIIVKGSSIGTSTDVDGNFTINNISDNALLVVSSIGYKKTEVPVTNENPIEIRLNEDSNLMDEVVVVGYGVQKKINLTGSVVSVDHDVLANRPIANVTTGLQGMLPGVSIVNTTSRPGDNNSSIRVRGIGTLNNSDPLILIDGVEGDMNTLNPDDIESVSVLKDAASSSIYGSRAANGVILITTRKADREVKPTVTYTGYFAMQKPTALPEMLDAVEYLTLLKEATSNVNKSWGYTQEDIDAVINGTDPNFRANTNWIKEITRDYAPQHGHNVNINGGNKNMGYYLSYGNLTTSGLMVGNGYHATRNNVRMKLNTELFDRLTIEGNVSYTDVDNWTPASSDSENSGLFYQALRSSPLTPVKFTDGQWGYGGSSANPIAQAYDGGFINYHKRETSLNFSAGLRIIDGLTAKVQYATRLVDVLRKQQQNIIQHFYPDTETPLAYTSNTSKFSQRDIAQRYQNVMAQVDYDKTIGKHSFHILAGFSQEWQLYQQMDASRQDLVSNDLHVLNAGTDLQTNSGYDNHWAIRSGFGRVNYNFNDRYLVEANLRYDLSSRFHKDHRGGYFPSASVAWRLTEESFMESTRSWLDNLKIRASYGTLGNQYTSSLYPYMALIQPSTSNMPIGGEITSSMQQSEASNNILSWESIKMTNIGLDVNLLNNRLSLTADYFIKNTDDILLKVKLPDVLGVSEPYQNAGKVQNKGWEIALAWQDKIGKDFTYGVNVTFSDVKNKVVSVGNTADDFSGDRIRAVGYPIDAFWGYKSDGLYTVDDFDYDIATNTYTPKATTPIIEEYRTKVQPGDIKYVDIDGDGKITPTEDRCYIGSAIPRYNYTIGLNAAWRGIDFSLFLQGVGKCDGYIGGMGRHAFTELANYPQKAHLDRWTWENQNPHASYPRFTYDETYNRDEFSSFWLEDASYLRVKNLQVGYTVPRKGIISKMHIENLRIYFSGENLWTFTDFFSSYDPEIPVSSGGYYPITASYSLGLSITFKMDKEYFKILIEKYLDGNASTAEVRELCEWIKNNDSLDRWIMQAIERSDSHLDEEVYERLYTRIKEDIESREKKSHRRFSFVPMLRWVAVVCLPIIAALAVYELGLDSKVDTLPLVVTAESGERAKVQLPDGTKVNINSASQISYPHDFNGERRIVELDGEAYFEVTPDKERPFVVKAAGLEITVLGTAFDVCAYKDDSEVSVVLLTGKVDVASESDRYVMQPDEKLVYDRNTGTMQVGKVYSKEYVEWTDGNLRFENESLENIVKVLSRVYNVKIVFDSAFPEGQYFFTGSIGSGGITNALDILSMTSSLHYEVRDSVIMLHKKMRISGGDSYWAEEIVQRTFVRLWEIHDQVSPDKSLISYLCTIAKNLLMNVYQRQTVEYIYAEYVLESSEEYSDNADGELDGKLLEEYIDRLAEELPPSRKKIFVLSKRKHFTNKEIAVELNISESTVATQLSLALKFMRDKLMAHYDELLPLVIYAALIKIVMKYPISIFLFISMFFVCSCAGLGGFPLYSGSYGSQAASRLTPVESPATGLYGYVNDLGMWVIQPKFRSAQRFRNNGLARVQIGVRYGAINMAGKVVINPVFEHSYDVDNAITSMEKGRLRGIDLWETRDSKSGLYGYLDYYGNWFIKPQYYNARGFNDEGFAVVEVGRNRWGAIDRNNRIVIQPNFKASYEAENALRRLLGYMGTKFSTRVWVSVVGIASIFFGSKGYADTVISVADFGLKPDTRENAVAYVQKAIEACRGKEPVTLVFPEGRYDFWPQYAHEKNYYETNTYDVFPKRLAMLFEGLHNITVDGNGSQFVMHDRIQPITVENCDGVTLKNFSIDWDIPLTAQARVTKVGSDFFEIEINVLESPYIIEDGKLVFVGEGWKSALGSMIEFESDTHFVVPGTGDLVLGWNWGDYTAVSPRYGIVRLSRKGGFERYPAEGNWLVLRHSTRDHAGIFICGSHDVRLSDVQVYHTAGLGILAQYSSDIAFKKVSVEPNAAKGRILSGHDDGFHLMGCKGKITVDSCRWAGLMDDPINIHGTCVRVVKVLSSDKVVCRFMHDMSKGMEWGFPGDKVGMIENNTMRTVATANIRSFKAIDEYEFELELTSDLPEEIGVGAALENLTWTPDVDIRNSFFGSCRARGLLVSTPGKVVIENNVFESSGSAILIAGDANYWYESGAVKDVLIKGNDFRYPCMSSMYQFCEAIISIEPEIPQPDTKYPFHSNIRIENNTFNPFDYPILYAKSVDGISFTGNVIQRNTTYKPFHKRKAAVTLVKCRRAKIKDNKIIGDVLGAPGGKLSIVKEMNLILRIIITGALLLLFACKSVYKADPFPEPERESGQTDVLALRAEPLDTVRVAFIGVGPRGMAAVKRFMNIEGVRVVALCDVDSFKVAKAQRILAAKGRGPAVEYCGPDSWKKVCERSDVDLIYNCTHWQLHTPIAVYAMEQGKHVAVEVPAALTVDECWQLVNTAEKTRKHCMMLENCCYDFFELATLNMAQQGVFGEIVHGEGAYIHDLREYNFDTASVSGYWDMWRLKYNTDHTGNPYPTHGLGPICQIMNIHRGDKMNYLVSMSSDQFGLTEYSRSRLGEEHAFASKKYDLGDMNTTLIKTEKGKTILIQHDVTSPRPYDRHHVIGGTKGFAQKYPVEGIALEPNAHRFLPEEKLDSLLKAYEHQFVKEIGNLARKVGGHGGMDFIMDYRLIYCLRNGLPLDQDVYDAAEWSCLVELTEYSVRNGSVPVRIPDFTRGAWEKLKGLEFAKMKKLIYFVCLAFAGIFLLGCEKNDMPEPEKPREEEPADSTDIVDPEEPDTIVEQKDDPENGIILDMPGITLKGWVHCNRVGMPGVVVTDGTNVTVTDEKGIYRMKRNTTASHVYISSPSGYTVCVKNSVPQFYAEINQRTDIVHKDFELVRLEKDDTKHTFIAIGDPQLYRDFELSYLKEAVNDLNSWVTQSRKGECVHYIVLGDLVFDKPEYHESSKEIFSMLNAPVYNVIGNHDHVFDKSEPAVKSNDLKADTVYKRHYGPTYYSYNRGKVHYVVLDDVEYWGGSGPKYVDAVSDEQIAWLQKDLMYVDKDKAIVLCLHAPTKRRTETRSFGNREQLYALLRGYADVQILSGHTHWNSVVTDDGSGMTEHIVAAMCGNWWQPELICSEGTPIGYKIFDVDGTSFKWKYKCVGQPEQYQMRVYPLGERINILRPKNVVLNVWDWDPSWKVEYSEDNGQNYRSMFRSLNMYDITAYNAFGAKGDNTFPVGRTWIQASESDHMFYCRPSIPYNQLKIRVTSRFGDMFSTTVNIQNLMKTNAIFSKKQLFGVCCALLLSPMAVFGQLIVGKSLGADHTADEQKALAVTKNGDMYISINANSFQIMKDDGTFDEIKNPYQESTTRAGILTKISADGKLLWSNMVCVQESANNSQVTSVCEVGDYLYVVGGVRTNVKGEHPVSVFGIPLVSQGEMDYYIAKLNAATGEAVWAKTFGGVRNWEMFNSVVADEAGNLYAVATFGNVSSAPLEMPLKDGSSTSLAVTNNWGEDYLLVKFNKDGEILWATSIGSKFRENGTPDVTVGEDGNPVICGVFNAANGNLMNESEEKREFYIGEQKYLLYPEQSKESALVKLNSTDGSVMWSRYFTGTGNQEVLKVQAVSGSNAVAVTGKANNQIIVEGSAGLSTETVTHVSGADHLFVISFDVDGKLLWSKSASGDTSSEGKEISSDDLGNIYVSGYFNGSLNWGDNIVLQKTGSNEKEGFFAKLNGSGKCLYAETVKGTGAESINLIAVNGDKLAVAGDRTTDVTLPYGDSETGVARYTVGDRNYKWFAASYTMKPSVSGISTLNGKRFVPFSYQIVPAFFEMPAVFEYSLAGNLPSGWILDPATGIISGKATEEASGSFSVMISNATDGESVEKTYTYSIVPKPCDILSIQPESLPSRAVTGAFYQQFTLENGEGKIVWTAENLPKGLSLDPDKGLLNGILQQTGELSFTIKAREESGCETSRSYTINAEEFNYSLAPNLKWINQIYGSEAFDHAKVNSIDKDGNVWVAASYFSATFSDEVSFPNIGNTDALVAKYNGIDGSFMWARTIGGSPVSGRNEQGQAIVTDVVTGDGVFTGIITPDARIGTLNETDSFPTNGGRDIGVIRFDKDGNKIWHKVFGSAKDWEAGINTTFDKKGNIYVIGYTNDGDIVIPMADGSSETLAGTSVDVVIIKLNGDGEGLWAKRLGTVNKGEEIYGLVTDDACNVYVSGMVNNGTVPFGNGKVVTATGITSFIAKYDEAGVCQWVTSLGSNGSLINGRGTSLVRDKNGNLYFAAICKGSSSISGTTETIEADASKTDGAIIKFNSDGQYVWHRMFASVADDGVTSLAVDESNNVYAVGYYEAELPVYESIKLQRNGNNRTAFVAKYSDEGEYLYAFSTGAIITDAVKPTGLAISIDKTTNDIILTGPTYGTIYPYGVSGSSNAFGGGRFMLARYSQDAALFGVFPQGIKGESYSAQLNISGFQKPLQVAYSLKDGDNLPDGLSLDTNTGEISGVLNEAGIFKFTVLATDGFVNASKEFSISVTGADCQMTVEAIISEDAENGKPFSARIYADNATGAVTWSIEEGSSLPYGLSISSLEDGVGLISGTPNAPAKEYSFTIVAEDEAGCRVTQLVYLNVIGESGIETLVSEGFVVYPNPVTDGMLKVSLKDLVSGNYVIEIADLSGKQVYKEEVRVEENMVKSISVNNMPSQWYVVTVRGMGVSYSQRFMVQMQNIRTIRYCFILFLSVLVSCKGQTDKLNDNCPLIPKPLSVDMQPGEFTFGDSVVIELKTDDEEIKRAANFLKTFVEQTGSCKAQIGTGEEARNKIVFTVCDTIAHDEAYRLDVSPRTITIASKGGAGAFYAVQTLRQLLPAECEKKICDENVILQVPCVNIYDEPRFKHRGFMLDVARHYFPLDFIKKNIDIMTLYKLNVLHLHLTDDQGWRIEIKSHPRLTSVGAWRKQSIAGHKNDVPRRYDGKPHGGYYTQDELREIVEYAHERFIEVIPEIEMPGHTQSILAAYPQLACFHKNYEVSCDWGVHKEVLCTKEGSFKLLEDVLSEVFEIFPSKYIHIGGDECPKDRWSECPVCQRNIKRLGLKDEHELQSYFIKRMEEFVNAHDRQIIGWDEILEGGIAPNAVVMSWRGEAGGIKAAKMNHSVIMTPRDFCYLDYYQSEDRDNEPLAIYGYLPLDSVYSYNPTEKLTSEQGRYILGIQGNLWTEYIATPEHAEYMAYPRAIALAEVGWSRQEQKDFTDFIYRLTIQSKRLDSLNVNYAKHFLFSVKNKNDKLMLRKLIRVWIIGIVFPLYAIAGQPSVKITHGPYLQNLSENEVTVVWTTDKPCKSWVEFSKKEDGKNFYSQLPRKAYASQDGLCCVDTLHRVTITGLEKNTTYFYRVLSQEVKELLPYRPVLGNIVSTDIWKKPLTFTTLDGRQETLSIVMINDIHGKNDLQKKLLEMAPPQNVDMVVFCGDMCNYINKQSDIFTGFLDTSVGLFASRKPFVYVRGNHETRGAYARNFFRYLAGPEGKFYYAFTYGPIRFIVLDSGEDKPDTDVEYSGLVDFDNYILEQKEWLARELESPEFRAASFRVVLSHIPFGKGSWYGSERLRKQLLPLLESVRIDLMLSGHNHAFGFMDKGKVTAFPIIVNSNNSVLTMFGSEDLLKVQVKQIDGKVLLEKEFSKMKAIKNIFLVLGILVTVSGCDYLDSEPEKKGTLEEAFASVNSARNFLYACYSFMPESSDHNGEPQFNGASDEVCITSQWATTWHYSKVANIGSQTAADPIYNYWSYFKSPTQSSRCKAYNLYGAIRQCYTFLNRVESVPGISAAEITDFSSQAKFLIAYYHYLLLRLYGPIVLIDREIPLDATGELAFPKRRPYDECVEWIADRLDEVAPLLPPIQTSDKYGAPTRAAARGIKSRMLLYAASPLFNGNSEYYSDFKNKDGEQLISLQYDKEKWKKALDAAEDAINEAHAAGHDLYTHLQAPVGISDAEKGYFNHRWSLVTMPSAGNTDIIWAYTGSRMNIQQMIAPRGLSQGSTTVPYGGLAPSMQMVETYLTKNGLPIDKDPSFQYDRRFGITTDPETGEKTVRLHLNREPRFYADIAYDRATNFELDGRDGIKGGKGYTLYLRMGEINPETNQTNGNDPLKDNITPNGYLWKKYLHPNTSFANNQVAVRATAFPLVRLTELYLNYVEAYYEYYGRLDGQALIYLNDIRSHAGIPDVETSWQGIAGKDYREIIRQERTIELMYEGHRFFDARRWKIAHLTFNKVQKRWNCFPAGFTTQSPQSAENYLTLRNSNEPTKTFNVPQHYLYPLDSRDININPNLVQNPGWMNFISILKGGKQQFLPKNLLIIKICSLLLVCCNVMAFGADNHTRDPLVSVNMKNATLESVLNYIEETTSYSFLYNKQQVDVGQRIDISQKDQPISVILDILFKGSDITYSINGKQIVLSKSRSNASSKVDKRLLTGTVIDSKGEAVIGANVIVKGEKSGKATDIEGNFSIEVPDKGVLLVSYIGFQPQEVSYGTKKNVTVVLQENNTSLDEVVVVGFGKQKKESVIGAIQSVKASELRVPTTNLTNTFAGRIAGVISVQKTGEPGADGANFWIRGVSTFASGSAQNALILIDGTESSTYDLNALAPETIESFSVLKDATATALYGSRGANGVLLVTTKSGRMNQKPTINVRVEGRMSMPTQIPELADGVTYMKMFNEAIEARTPGANPQFTDDQIQGTIENRNPYLYPNNDWYDIIFKDVTFNQAANINVSGGSKNMDYFVSATFNNDMGLVQEAKENPLKNNIQNLRYSFQANVNTHISSTTKMGVKLNVQIQDYKGPYNSINTIFNRVMWAQPTYFPVKFPQIEGTNYIAWGNKSGGAQLNRYPNPYAELASGIKEMFRITTMATFNIDQDLKFITKGLSVKGLFSMKHFSSTTLNRTYTPYYFEIDPNTIVTDPITGNQSWKLRNVNNDGTDAFSFTKAYSGDRLFNFNVSLDYQRKFADLHDISAQLIYLQRGVYSSNPANYNSSLGELNQGMAGRFTYDFDKRYFFEFNFGYNGSDNFAKGKRFGFFPSYALGYIISNEDFFAPLNKTISLLKLRGSYGTVGNSNSSVRFPGYTNVNMNGAGYAFGEDFKATEAGAIITTYGNENATWEVAKKANVGIELGLFDQKFLLIADYFHENRDKILMTRQTISPTIGIGDANPVANVGKVTNRGVDMSLEYNHAFSKDIVLSVKGNFTYAVNKILEKDEPHYPFSYQYERGGALNRIGPAYIALGLFKDEEDIKNSPSQEAIMPNIKPGDIKYQDLNEDGVVNEYDRTYIGNPYIPQIVYGFGASFQYKNWDFSVFFQGAGKVSIYLDDIHPFDIYHKNVLKFVADDYWSASNPNPNAKYPRLAHNVDNTNTYQKSTFWLRDGSFLRLKNAEIGYSYKFMRAYIAGSNLLTFTGFKYWDPEIGGGSNSGNGLVYPLQRVFNLGVQFNFMELSNENIDRLIVRYLSGNLELQDKRVLETWISNNQDNYDYFLKMKNLWEVTHPAFDVRSISTTKALSRIKLKMGLREKRVIRIYRYWSRVAAVLIIPILFALIYMVADRFVEQDYSKISYQKISAPYGTRIQMNLPDGSIVWLNSGGELKYPTKFKAGERSVYLNGEAFFEVRSDKKNPFIVYTEDMEVKATGTAFNVEGYSNDTINAVTMVNGVVEVELDRSKERLNLKPGQRINYNTKRQNYRVEEVDTYKWCAWKDGKLIFRDEPLDDVFRKIGQVYNADIVVMDKDLAKHMYRATFQGETLDEILRLMKLTVPMKYIEKTSEKAMPNGVYSKRYIEVVRLMNHKEIYDLNILSESLISNDETFQQACDDDLMRRLALDDERSFDSIFKLYYKDLLLYAGSYLRERQVCEDIVQSLFMHLWYDRKTLSVGRSLKSYLLISVRNRCFDYMRHQNVRNDYFDYVNENSVLSSSNTEEYILYSELQDHIKKAINKLPKAQKEVFVLSRIKGIKYKEIAKKLNVSERTVEVRISQSLKTLRTLLKDFFLLIAVLFVRMRYSGCIEKFLEAVLNLFRDRLRPMLKQIGVRDTQSIAGYMNTSLAGIRNLLFDLGGVIINLDRQRCVDALTALGDEKADEMLDLSVQRGTLMDLEEGKISPSDFFKRMRQKIGKAVSDEEIVHALNELLIGIPLDRLTLLRKLRQRFNVMMLSNTNPIMFDTKIAECFAQEGLSITDYFDDVYLSYRLKSCKPDIAIFKKVIELSRIVPQETLFFDDSQKNLDAAASLGFKTFLVTPDRDIVTFFNTQSIDDFMTSEYKGITNDQAAFAALGVFDGVHTGHRAVIEKVKEEAAMRNLSSAVISFRTHPQQVLHPEIPFRMLTSPEERAELLRKTGIDRTIFLDFTPEMSLLSAYDFLKILSNRYCIKGLIIGYDHRFGHNRAEGFEEYVKYGKDLGIEIIHAPEFVTDLGPVSSSIIRKYLLQGDVCTANRLLSYPYTLHGNVVKGFQVGRKIGFPTANLNIDYPDKLIPANGVYAVRIGIPDGKHYGGMLNIGHRPTLNRPNDYSIEVNIFDFSEDLYGKTLSVELIEYVRTEKTFADIKALQSQLVKDKETIRKILSEMQKKFWKDYTSPMSRMRQAWGFGIHSPFAFRLITKVIREKARYYAYDDIEAICHEHVDDSLSHRQKHLRKRISTSRGRLFFRLTNFFRPDNILEIGTSWGISTLYLRLAGRQSEITVVEPLPEVHDFAESLFAEVGEKADFVREEYATFLLDYFRQTPERLYIVVNRLPKPYYRALPDLLAPVLDMHALLIIDGIRSNSEVKSWWEKLVKDERVRVTVDMKNVGLVCCDPKLNKQDYQVSLMKNHRNFWALLPVLVFVLLSFVYFCPDVIEGKILFQHDTQQGLAIGHEAKTYAEETGEMPRWTGTVFSGMPTFQIAPSYASNEPLKGLQKIYNLWLVSPVSLLFIMMLGFYILMLSLNVRWYLAAFGAIAYAFSSYFFIIIAAGHIWKFITLAYIPPTIAGIVLAYRGKYLLGGALAALFGALQIMSNHVQMSYYFLFVIFAVVIAYAVEHYRSHTLPRFFKATGVLVVAALLAVGANASNLYHTYKYSKESMRGGHTELTSQDNSQENTGSGLDKDYITQWSYGKMETLTLLIPDSKGGASGLLSENEHATKAADPQIRPYLSQVDRYWGDQPFTSGPVYVGALIFFLFVLGCFIVRTPLKWALLAVTILTVMLSWGKNMMWFTDWFIDYFPMYNRFRTVSSILVVAEFCMPLLAVLALKKIFDDPSILKREKWSFYLSGGIVGGITLLAALFPGLFDDFLKDYELEAIQQPGYGELFAGIAEARRAIFTADAWRSFVIVALGFVALWLLREKKLGSTVAMVALVVILIGDMYPVNKRYLNSGNFVTAARKTNPFPMTEADRYILQDKDMNYRVLNAAAGPTLEASFNEPRTSYYHKSVGGYHAAKLRRYQDLIKHQLENANPAVLNMLNTRYIIQPLENGKETVVRNPGALGNAWFVSEVKWVDNADAEMEAITDFDPSFTAVADRKFKNEIGEKIIPPVAGDTIYETAYKPDELTYRYQSRNGGLAVFSEIYFPWGWQVTVDGKPVDMARVNYVLRAVNLPAGDHEVIFRFDPQSVHTTEAVAYVSLFLILGAFVVVGLGAWKKRNDLSVEDMIKKIYLPLMLLMTLAFVGCNKDMKPLSADYFTVTPSPLEVVGGQVPATVTGTFPEKYFDKKSVVTVTPYLVYADGETAGTPFVYQGEKVEGNDQAISYKMGGVVSMPVNFKYIPAMRKSELQLAFKVQRGKKTYDLPRVTVAEGVISTAEIANAQELNPAITPDKFQRIIEEKYSADIMFLIQQANLRSEQLKSEQMNALHNEIKAATEAPNKELTNINVASYASPDGGVKLNTTLAENREKNTVNYMKKSLKKGKIDADMTAEFTAQDWEGFKELVSKSNIQDKELILNVLSMYSDPEQREREIKNMSSVFKVLAEEILPQLRYSRITASVNVIGKSDEEISKLAKEDAKALSVDELLYAATLVKTNKEKAAIYAKVVEIYPNDYRGYNNLGMVQYEEGDLAAAQNNFAKAARIAPNTPEVAMNQGLISLANNDYAKAEQAFGKSAGVEELNEALGVFYMKKGDYNAAVKAFGDVKSNNAALAQILTKDYSKAKATLAGVEAPNANTYYLMAVLGARTNNEQMVVSNLKKSISMDSSKAQQAATDLEFAKFDIASLVKMALVDTDNLLKRFSRYLRLERGLSENTIAGYMSDVEKLVDFIDSENLDWRTVTGADLHQFVATLQDLGIGARSQARIISGIKSFFNFLRMEKCIDTNPSELIETPKLGMKLPDVLTVEEVDELVNSFDLSKPEERRNRAIVETLYSCGLRVSELVGLRMSNLYFNDGYIIVEGKGKKQRLVPISEKAIKEIRPYIDDRLSLDIKRGNENILFLNRRGTQLTRVMIFYIIKRACERCGIRKKVSPHTLRHTFATHLLEGGANLRAIQQMLGHESITTTEIYTHLDRQFLRQEILQHHPRNKKTLMDILIINGPNLNLLGKREKSIYGEKSFEDYLCELQQRYAQHHIAYYQSNIEGELIGKIQEAGFSCDGIVLNAGAYTHTSIAIGDAIRAVPAPVIEVHISNIHAREEYRHTSMIAAAAKGSIIGFGLDSYRLAIEALTENERMSKYTKIVATISDARCDVNFIKQLYESGMNVVRMNSAHLQEEGFQKIIDNVRAVSNKIAILMDTKGPEVRTTALSGDSNILFSTGDIVRITGKEGTLTGNGYIGVSYPRFAEDLSIGSHILIDDGELEFVVRKKENDDLLCESLNNGELGARKSVNVPGVRINLPSLTEKDIRNIHYAIKQNIDFIAHSFVRSKQDVLDIQAILDEYKSPIKIIAKIENQEGVDNIDEILEAAYGVMVARGDLGIEVPQEKIPGIQARLIKKCIQAKKPVIVATQMLHSMIKNPRPTRAEVTDIANAIYQHTDALMLSGETAYGKYPVEAVATMARVAEEAENNKLTENNIRVVSTDDPDVTSFLAKQAVKTFNKLGTKAIVTDSYTGRTARYVAAFRGRYPVLAICYYERTIRLLALSYGVFPLYQERTRTSREYLFNGLNHLMEQHLINRDDLIAYLGGGFGEGKGTTFLEINRVGEVLDNFDHYTLPNMEDTEAMTPELEEYILTHIDKEDELLASLDRNTHLYHLRPRMVSGHLQGRILKMFCRMIRPHRILELGTFTGYSALCLAEGLTEGGEVHTIEIDDEIEDFTRSYFDKSPLRDRIKLIIGDASDIIPTLTDTYDIVFIDANKRDYLKYYELVLPKVRPEGFILADNTLWDGKVVTDPNSRDAQTIGIERFNDFVATDNRVEKIILPLRDGLTILWKKPMETTRQNKISRLLQKELSDIFLAETRKTHGIIISVSVVRVSPDLSTAKAYLSIFPPEKSAEMIENINANTKTIRYELSQRVRYQLRKTPELSFFLDDSLDYIENIDSLLKKMNRLARKIAWRYLFSKKSHSAINAISIVSVCGVAITTLALVCTLSVYNGFTELIGSLYSQIDPQIKITPLQGKTLDTEEETIEQIAEWNEVKTFTPVIEENALCIYKDRQRPVLVKGVPDNYTELSHIQDIVTSGTFQLNDGRIDYVSLGIGVAGQLGVVANSPYPVELYAPNRLGKVNLTNPSQSFNGRRIFVSSTFCANQAIYDDQLAIIPLSTAREMFSYTTEATAIELRLTPTTNENEFAKKLREHLGDAYRVATHIQQNDWYKWVQIEKWITFLILSFILMIATFNVIGALSMLIIDKKRDIDTLQNLGADDRLISKIFLVEGWLISAIGAGSGLILGVILCYLQQEYGILKLGSSEGVFITDAYPVKLELLDTLAVTAIVLILGFVTAWYPAKFLRKRLLTAKQNEQMASIFSRIVAGEIPCYKVAEDENYFAFLDISPVAKGHTLVIPKQEVDYIFDLDDETYVGLTRFAKRVAKAIEKAIPCKRVGVAVMGLEVPHTHIHLVPINKEADMNFFRDKLSLESTEMQAIAEAIAREMEMAITYMTEEGYKKLMEEIAYLENVKRPEISRAIGEARDKGDLSENAEYDAAKEAQGMLEMKISQLKDLVANARFIDESKLNTHTVQILNTVKIKNVKNGAVMTYTIVSESEANLREGKISATTPIAKGLLGKKVGDIAEIQVPSGLMSFEIVDISIMKKWVFGCAMALVITSCDNKKFSIQGRVADADGQVLYLESLAVNGTELLDSVELDKDGRFKFKYHAPQYPEFYQLRLDKSIIHLAIDSTETLNLSANAADFANDYELTGSDECVKMRIVAQESAKLKKRIDELSRAMSSNSDRVDDLRKQAIEDLAAYKKKMFDLVLENPASATAYYIVFQEINGDKIFDPYDADDRKLIAAVATGFDSLYPDSPRSKQLKNMTLAAIAAERAAQKEKPEIEASTANFLDIELYDLRGRKKVLSDFVDAGKVVLLSFTAYQADYSPVYNMKLAELYKKYKSKGLEIYQVSLDADEQAWKVAADNLPWICVRDPQSVYSHNAAMYNVKTLPTCFVIDRNDGIVKRIEKVDEIENAVQSRLMIKQVIKKTIDLGDGRTITIETGKLAKQADGAVEVRMGNTMLLATVCSAQEAGEGVDFMPLQVEYKERFSAFGRFPGGFTKREGRASDYEILTSRLVDRVLRPLFPENYHADTFVNIMLFSSDGVDMPDALAGLAASAALAVSDIPFNGPISEVRVARIDGKFKINPTFAELEKADMDLMVGATYENIMMVEGEMDEVSEADLLEALKAAHEAIKVHCLVQKELAEAVGSTVKREYCHETNDEELRKDVWAKCYDKAYAIARSGNADKHARQNAFDAIVDEYLAGMSEEDAAEKGALVKRYYHDVEKEAVRRCILDEGIRLDGRTTTQIRPIWCEVDYIPGPHGSAVFTRGETQSLSTVTLGTKLDEKILDDVLNQGRDRFLLHYNFPPFSTGEAKAQRGVGRREIGHGNLANRALKRMIPADYPYVVRVVSDILESNGSSSMATVCAGTLALMDAGVKIKKPVSGIAMGLITDKDNVKYAILSDILGDEDHLGDMDFKVTGTRDGITATQMDIKCDGLSYEVLEKALNQAREGRLHILNIITDTIAEPRADLKPHAPRIETMIIPKDMIGAVIGPGGKIIQSIQEASGAVVTIDEINNEGHIEISAANLDSIKDAIRRIKSITAQPEEGETYTGVVKSILPFGAFVEILPGKDGLLHISEISWDRLESMETSGIHEGDEVTVKLIEIDKKTGKYRLSMKALLPRPERAPRSDRHSRNDNNQMVRLSAAFGSVKPRGIDMNFSDEIFVDNHIPDFSVKGMRIFRSCFYFFSLYSRAVFQGYFTNERNMNKLELHSFGMIVAGVFETLWMAALKQQLQQKLQQKLSPQQIQLIRLLELTEIEFEERVQQELVDNPALEEGREEIPDSINEFDANADEDGNPGESAEELTLGDYRNEEDIPDYRLEADNYSKDDKKEDIPFVSASSFHDYLESQLGELSLDETSYQIAQYIIGNIDDNGYLQRPIQAISDDLIFQVGLDVPVSQVEDILQMIQEFEPAGVGASNLRECLLLQLERHEGTPANLLAYKIIDKMFEEFSKKHYDKIMRQCNVCEEELKQAIREITLLNPKPGSAWNNSYSGSSEHHIIPDFFVEAQDGELTIGLNNGNIPELHVSRDYQDMFDDYSSNKQNQTREKRDALLFVKQKLDAAQWFVNAVKQRQETLLSTIKVIVDLQKDFFLTGDERNLKPMILKDVAERAGYDISTISRASNSKYVQTNFGIYPLKYFFSESMQNDAGEEVSTREIKRLLEELVDHEDKHKPLSDDKLCELLQQKGYPIARRTIAKYREQLSIPVARLRKEIMKLLATILSTIFHPLLMPTYGIAIALYTSYMRVFGDRLLGIIVIGVLLTTCILPSLGIFILYKTGHISDFRLHNRTERTVPYIINFVCYIACYLYLYRFGIPNWILSFIAGAIVSLIISLFINRYWKISAHMVAAGAMVVLVFLMSIYRLMLTPYIFPLQITIILLAGLIGSSRILLNRHTIGQVGAGFALGAMCCGFLFFLFIMKPIVSIIMGSTSDLPIMEKAAKLLDECEIPFEMLALSAHRTPAEVEEFAKNARSRGIKVIIAAAGMAAHLPGVIASMTTLPVIGVPIKSGMEGLDALLAIVQMPPGIPVATVGVNAALNAAILATQILALGDETVASKVEKYKTGLTKKIVDANQELASIKYKFKTNMDYYNYHRRKSSIVQIGNTPLGGEYPVRIQSMTNTSTLDTAASVDQCIRIIQAGADYVRLTAQGVREAENLGEIKRELIARGYTTPLVADIHFNPKAADAAAYTVDKVRINPGNFVDSARTFKQLSYTDEEYTAELQKLKERFIPFLNICKEQHTAIRLGVNHGSLSDRIMSRYGDTPEGMVESCMEFLRICRSENFDNVVISIKASNTVVMVRTVRLLIETMESEGMNYPLHLGVTEAGDGEDGRIKSAVGIGTLLADGIGDTIRVSLSEAPEAEIPVACKLVNYITARTGHKPITTPDVSLEQMAARERESCNCIGGNQQPVVIAEGVPQTGTRADFYYTHDRTVGGDIRSIVDFAHYHGENDSYPLFQMHELSALKSTPATVRFLQADAADLSEEIIGELSQESGIVLILSSRHTNPVGDLRAALARLTAANCKLPVVFMVEYEEKESEDLQVKAGADFGPFLLDNLIDGIFLRNNGNISSQRLTDYMFTILQAARKRFSKTEYISCPSCGRTMFDLQTTIARVKAATSHLTGLKIGIMGCIVNGPGEMADADYGYIGAGRGKVSLYKGKECIEKNIPEEMAIEKLIALIKAHGDWIDPSMENQNDIHRELTSLPVGKLLWKYSVPAIVGTMVMSLYNVIDRIFIGQGVGADAISGLALTFPIMSLAGAIGMLVGLGASARISIVLGQNDKVKAEKILANSLVLSLSFAVCYLTFFSVYMDNILRSFGGSDRTIPYAREFLIYIMPGMLCTNLCYSFNNMMRASGYPEKAMYTMLIGAFSNLILAPIFIFWLDWGIKGAAIATDIAMAISAAFVMIHFFNPKSQLRFHRRYFKLEWGILFNIVSIGLAPFLVNVASSVINAIINTSLYRYGGDEAIGAFGIFNSYATLVVMLIIGLCQGMQPIVGYNYGAGNYTRMKKAFVLTGIVATICCTVGWIGSTFFPYYIIRAFTTDTNLIDVAIHGMRIVMGVFPIVGFQIVTTNLFQSLGMASKSIFLSLTRQVIFLIPLLLIFPRIYALNGIWIAMPVSDTIATAITLLLLWRTDKKLQNKNSVITRMEKIDNLDRQILEIIMRNARIPSKDVAAECGVSRAAIHQRIQRMIDMHVITGSGYHVNPKSLGFRTCTYIGVKLEKGSMYRDVVPELEKIPEVVECHFTTGPYTMLCKLYARDNEHLMELLNDKIQNIHGVVSTETLISLEQSMNREIPVMKKMKKTILFCVALAGLTAMSSCGNKAATKLENAADSASYALGVSNGARFGEALKSGMYEQLKNIDPNDFMKGLAAALKTDSTQRSYEMGLSQGLYIKEMLNNIKQGTGVEIDIPTFVQAYKQAMDGDTTLLISAMQSNSVLDAIFRAAAEAKEKEELARLAETPEAKENLAKGEAFLAEKAKEEGVVKTESGLLYKVLKEGKGDKVQSNQRAKVSYKGTLIDGTQFDSNASATFSPTQVVKGFGEGLQLMQKGGKYILYIPAELGYGVRGGGDKIPTNSTLIFEVEVLDIVKMDKLSYALGLSMGHNFLGSGIKSLNVEDFAKGVEAVYKQEKPEISFDEAKKIINEFFSNLQDEIAETNKQAGKEFLAENAKRSGVVVLPSGLQYEVLAEGKGRKPKVTDKVQCHYHGTLIDGQVFDSSIQRGTPAVFGVNQVIPGWVEALQLMPEGSRWKLYIPSDLAYGEQGAGGSIPANATLIFEVELIKILMKKKLVVLTGAGMSVESGLSTFRDSGGLWDRYPVEDVATPEGWERNPALVQEFYNKRRKELLTVEPNKGHFGLAALEKDYDVTVITQNVDNLHERAGSTHVIHLHGELTKVRSTKNENRIYELSPDHYEIKADETDRYGNRLRPHIVWFGEAVPMIEPAIEITEEADIFVVIGTSLNVYPAAGLLRYVRPQVPIYLIDPKEVKVPVDRSVRVIQKGASEGVAELIALLRRMEYTFLDFLTLIGSVGLFLYGMKVMSEGLQKVAGDRLRNILAVMTKNRFSGMLTGILITALIQSSSASTVMVVSFVNAGLMTLGQSMAVIMGANVGTTATAWLISLFGFKVDITIFALPLIGLGVPLLFSNKSSRKSWGEFIIGFSFLFMGLSYINNSVPDLRSNPEVFEFLSSYTQHGFISILGFCAVGAILTMIVQSSSASMAIFLIMCSKGWISFDIAAALILGSNIGTTITPLLASIGANVSAKRAAMGHLLFNMLGSMWALVLYYPFIRFIVWICTSLGVGNPNDLMSFISTWEQSDPALVAALNSGQNLGSADFEQQKAHFAAMQFSVSFGLSMFHTVFNVINVTIMIWFTGLYERIVTRLVRVKDKNEEEFQLKFISRGMLSASELNLPQAHQEIAVYAERVQRMFGMVADLLHEKEGSEAYLKLYNRIEKYEQICDRMELEIAGFLNLVVGGRLSYEGKMMVNSMLTIVTEIESIGDCCYNLARTLQRKQDSHIDFNDEIVSNIDAMFKLDSEALSNMVALLSSNEPLMSEIMISYNKECEINNYRNQLRGANVENINNKHYEYQSGIYYMDMISECERLGDYVINVVDAIKQQQVKHAMEKEQFDVYCVNTGKTIRVNGGESLLEIYKLANPRLAHRPICAYVNNKTEELKYRVFGPKDIEFLDISHPAGMRTYVRSLCFVMYKAINDIIPGTRLRIEHSLSHGYYCLLDNENALEPESIDKIKHRMAEIIAADIPFKKIECHTADAIEVFREQGMFDKIELLKTTHELYTQYHTLDGLADSYYSWLTPSTGYLQGFDLVKYNGGVLLVPPTPDAPTEPALIEPQEKMLNAFKEYLTFNQIIGLSNIGDLNKAVETRQATDLIKVAEALHEKKIGKIADDITRRYHENGTRIVLISGPSSSGKTTFSKRLSIQLMTNLLKPVAISLDNYFVNRTDTPLDETSDYDYESLYALDLDLFNKDLNRLLQGETIEMPTYNFETGEREYRGNTLKLEQGSVLILEGIHGLNPDLTPQIETHLKYRIYVSALTTISIDDHNWIPTADNRLLRRIIRDHKYRGASAQSTIARWGSVRRGEEKWIFPYQENADAMFNSSLLFELAVMKDYAQPILSAVPHDCPEYAEAHRLLRFLGYFQSINQREIPPTSLLREFLGGSSFKYMDKLFSIRQPITEELALLNKTLTESLHTTSPLMNEVIQAYLESKGKQIRPILVLLCAKLFGEVPREAIDAAASLEMLHNASLIHDDVVDESQKRRGLPTINHLYDNRIAVLVGDYFVSCALACSIKTNKMPIVSCLGVLGRDLARGEIDQLSNARNHLLDENAYFEVIRRKTASLFYACMQVGALSAGASAEDVARLGMFGEKLGLCFQIKDDIFDYYEDKVIGKPTGNDLREGKITLPLIYAITHGEGSENERMRDLLLSEEYLSSDSVHTLIEYAKTQGGIEYAYTTMGRIRNEAVDLLSVFPPSETIDALIAILDYTIEREKMQEKRLFLLDAYALIYRSYYAFIKNPRINSKGINTSAILGFVNTLEELLRKENPSHIAVGFDPQGPTFRHEAYEQYKAQREETPEVIRYSVPIIKEIIQAYNIPIIEVPGFEADDVIGSLAKLAEKEGFDTYMMTPDKDYGQLVSSHIFMYRPKFGGDFEILGPEEIKTKYGIQSPEQVIDILGLMGDSSDNIPGCPGVGEKTAVKLIADFGGIENLLANTDRLKGALKTKVEENRSQIEFSKFLATIKTDVPLTFDEKSLRREPVNSEKLRPIFEELEFRNLTERVLGNQPTTPAPKKTVQPSLFDNVPETEQTDNSAPQSNLANIASIPHTYHLTDTPEKMWDLAALLSCASAFAFDTETTGVDPMNVELVGLSFALKEHEAYYIPIPEDQEKAREIVNIFKSALENPKSLKIGQNIKYDYIVLHNYGIHVKGDFFDTMVAHYLLQPEQYHNMDYLANVYLGYEPVSIEKLIGPKGKKQLSMRQVPVEQVCEYAAEDADVTLQLKNRLEKELKTEKMEKLFYDIEMPLTKVLADMEITGVNVDITELKSSSDILTRRMNELEQEIFQLAGVTFNVSSARQVGEVLFERLKIDEKAKKTKTGQYSTTEEILEKLRSRHPIVGKILDQRGIRKLLSTYINALPELINPKTGKIHTSFNQTITSTGRLSSSNPNLQNIPIRDNEGREIRRAFVPDKDCVFFSADYSQIELRIMAHLSGDRHMIEAFREGSDIHAATAAKIYKVPIDAVTADMRRKAKTANFGIIYGISVFGLAERLNIPRSEAKILIDGYFESYPQIKEYMNKSIEVAREKGYVETICGRKRMLPDIHSHNSVVRGYAERNAINAPIQGSAADIIKIAMIRIAKRLENEHLRSRMILQVHDELNFNVPVEEIERVKAIVCEEMENAYPLQVPLLADSGVGRNWLEAHMDIQNFSALFNTPARCEAFLKLIKDNKTKHIFIQGLEGSSIALFFSNLLEHKQAHIIIANDLDEAGYLYNDLVQINGNDHILLFPSGYKRDIKYGQPDPPSEILRTEVLNRLCQKGESLLIVTYPEAIAEKVVPVNMLSEQTLHIDKNSKCDIITLSDKLRERGFEEVDYVYEPGQFAVRGSILDVFSYTNELPYRIDFFGKEVESIRTFEVETQLSTGKLEEVYIVANVCGQEVSGISILDFIDKNTILICHNLSWVIDRISTIASESLSEQTLIAEEGDRYAMQKIIDVTAFQKKITTFRRIDYGASSEANAPAVIRFNCAPQGVYHKNFDLVSQSFSQFIEKGYTLYILSDSEKQIERLQAIFEERGDSISFTPVLKTLHEGFVDNDLKIGCFTDHQIFDRFHKYTLKSEHARSGKLALSLKELNQIEVGDYIVHVDHGIGRFGGLIHTEINGKMQEVIKLTYQNDDIIFVSIHALHKLAKYRAKEGEAPRINKLGSGAWERMKEKTKGKMKEIARDLIKLYAARKEEKGFAFSPDSFLQQELEASFIYEDTPDQIKSTAEVKADMERERPMDRLICGDVGFGKTEIAIRAAFKATCDNKQVAVLVPTTVLAFQHYQTFKERLKEFPVRIEYLSRARKASEVKAILKDLADRKIDIIIGTHKLIGKDVKFNDLGLLIVDEEQKFGVAVKEKLKQMKVNVDTLTMSATPIPRTLQFSLMGARDLSVISTPPANRHPIQTEVHAFNDDIIKEAINFEMSRGGQIFFVNNRIPQLYELENTIHRLVPDARVVIGHGQMPPEKLEQAIIDFVNYDYDILLATTIIESGIDMPNTNTIIINDAQNFGLSELHQLRGRVGRSNRKAFCYLLTPPRHTFSVDARRRLQAIESFSELGSGIHIAMQDLDIRGAGNLLGAEQSGFIADLGYETYQKILKEAVEELKNDEFSDLYYGADSDTKPEEFVSECTIESDLEILFPANYVPQESERISLYQELDNMERETDIRQFCERLEDRFGRIPHEAMELIRVVRLRRLAKQLGIEKVGLKQGYMYLYFVSDERVAYYQSAAFGRILGFLQKNPKLCKLREINGRRSLAIKDITSVESAVSVLEEVLQTLPVMKKLSFLFLTIGIIWGCWAESPKREFRATWLASVSNIDWPKSTQTSEEQKAALIKIFDGMQAARMNAVWLQVRPMSDALYNSAYEPWSKFLTGTRGVDPGYDPLAFAIEEAHKRGMELHAWINPYRYESEKNMNGADDSIRKNHPEWLLEYSSSFILDPGNPEVIEYLVKVTKDIVTKYNVDGIVFDDYFYPYEGTKNEDAYSQSLYKPEGKNVGDWRRENCNKLIADIYAMIQETKPTVKFGIGPFGIWGGSSSVAASYGIEYLNTRGGTSAYSQLYCDGVAWLKAKTIDYISPQCYWPSFNTHVWGYKTLVPWWAKVAKTMDRHFYSSMRISTMPQNSPQRMKSVLRRLGMSENEYNGLSMVERSIAATAAKGTEECGFEVDMNRSTDLMGAPGHVFFNTTQFFSYGLDTYVAENKFTEPALTPVMSWKTPCDLPDITDISVSGNMLSWSADADETIRYAVYFVPSRVANNPQTYETSAYLKRVTWEKSIDVSSYTQSGYVYAITAIDPYGNESQPYIKTPSGVQSGIVDSLVVYGGSGAIYVSVPKDMDIYIYSFTGQLIRMVRVSGGNSEITVPAGMYIVNGTKVAVQMSLQCGIVGLPNVGKSTLFNCLSNAKAQSANFPFCTIEPNVGVITVPDERLNKLAELVHPQRIVPTTVEIVDIAGLVKGASKGEGLGNKFLANIRETDAILHVLRCFDDDNITHVDGTVNPVRDKEIIDFELQLKDLETIESRISKVQKQAQTGGDKAAKVTYEVLSRYKEALEQGKAARTVTFETKDEQKIAHDLFLLTNKPVMYVCNVDDNSAVSGNKYVDMVREAVKDENAEILILAAKTESEIAEFETYEERQMFLQEIGLEESGVSRLIRAAYSLLNLETYFTAGPQEVRAWTYLKGSKAPQCAGIIHTDFEKGFIRAEVIKYDDYIALGSENACKEAGKMYIEGKEYVVQDGDIMHFRFNVMKNIRLTFATVTVLSFCSGFINPIWAGKSDEKNFEISRNLDIFNSLFKELNMFYVDTINAEKAIGDGVNAMLARLDPYTEYIPEKEKDDFFFSTTGEYAGIGSFIMERDNAVYISEPYEGMPAQLAGLRPGDKIVMIDNDTVLGWKSAKVSERLKGPANTQLKVTVERPGVKDLLSFELTRKKIQMPAVPYYDVVCDSVGYIYLSSFTDTSAGEVKRALQDLKKRGITSLVLDLRSNGGGILEQAVQIVNLFVPKGVEVLSTRGRNKKMDKIYKTTQEPVDVKMPLAVLIDGGTASSSEIVAGALQDLDRAVIIGSRSYGKGLVQSTRPLPYNGMLKVTIARYYIPSGRLIQAIDYSHRNPDGSVARIPDSLTHEFKTAHGRIVRDGGGIKPDVETSMERRGNISYYLMKDFYFFDYATRYAAEHDTIPAPKDFKLSDEEYEEFKAFVKSKDFKYDKQSERILSDLKEVAKFEGYFDENTQKQFEALEACLNHDLDRDLETFHDEIAELLSIEIVKRYYYQKGEIIESIKNDKDLKEACRILGNKSRYDEILNLSGKHMAYFQLCNIFAKKISRMRIVGLGNALTDVLARLHSDECFDEMGLLKGGMQLIDEEKLLRIMSVFEGLETTLASGGSAANAVSGVARMGIESGFIGKIGRDAYGRFFREDMERNGVQTLLIEGEQASGCAMTMITPDGERTFGTFLGAAATLCAEELSAEMFEGYDILHIEGYLVQDTSLILRAVQLAKEAGLSVSFDMASYNVVKDNYAIIRDLVENYVDILFANEEEALAYTGEEPRKATEILSRYCRIAVVKCGAQGSFVGCEGIITEVPATPEVRVDSTGAGDLYASGFLYGLSQNCSLGVCGAIGSLLAGRVIKVIGTKMSDEIWTEIKLKVSSMVAEDIRHMRKYLFCEAGFIEKPNWLPNCWVNVECPTPDDFDFLEKELNVPAAFLHDIADTDERPRIDSEGNWLLTILRIPIFVKDNNITYTTVPIGIITNNEIIISVCYHSTAMIPDFIEYTRRKGINVPNRYELILRLIYSSSVWFLKYLKQINNEVSTAEKELQQSIRNEDLLRLMNLQKCLVYFNTSIRGNEVMIRKLPKIFNEKDYQNPELLEDVMIELKQAQNMVNIYSDILTGTMDAFASIISNNVNTIMKRMTSLSIVLMVPTLIASFYGMNVDIHIEELPHAFSLIVCFSVLLSALAFIVFRKIKWFMKTRTLYISDLDGTLLNSNSIVTSHSVENINLLLQKGMLFTIATARTPATVVPLLKQLQLDLPVVLMNGAVLYDIQNKHYIQTNGFTDDSALRYISVLENRDLIPFVYRIENNKLQVFHKPLVNNIQRDFKYKRENTPYKDFIPTDNYTAELTDNPPLFMLVIDRFDKLETAAAEITRAGNCSVFCYRDIAVPDYGNLEIYPKGVSKAATAQLIIDRINPWEVVAFGDNLNDLPLFNLADRRYAPVNATEEIKRQATAIIPDNDHDGVARFLCEDFLMKNLYCGNNLYFCARNNSKGMKEKLKGHSAMFTANFLWGIMSPISKAIFLTGTISAFSLTNMRMAGAAILFWIASLFMPREPITKRDLLLLFVASLFGITLNQGFFVLGLSYTTPIDASVVASLAPIITMILAAFIQKEPMTGKKVVGVFMGLSGALMLILNGAGTVSEGLSGGRVMGDLFCLVAEISFAIYYVAFKGLISRYTPVTLMKWMFLFSTICCLPLGGNDLLSIPYSDLSGTIYLDLFFVVFGATFLSYMLVSIGQKRLRPTILSMYNYTQPIVASLLAVWWGMDSFDLKKGFAILLVFLGVYVVTTSKSRAQVEAEMARQNNAVDKMKFKSLIFIVLAASMTCTDIYAENNRPIDIALWENGPLEKNDDEGKTYDENVRIYRPSIKVFLPEGKNTGRAVIMCPGGGYALLAYDHEGYAYADYFKHQGIALIVLKYRMPHGNHKVPMSDVCEAMRVVKSHAAEWKINPDDIGIMGFSAGGHLASTFATHYPAELRPAFQILVYPVISMDETITHSGSRENLIGKNPSKALIDYYSNEKHVNAESPRAFIALSDDDRAVPVENSLRYYKALHRYQIPVSLHIYPTGGHGWGYNESFRFKKAVHDELSDWLRSFMKTKAYFNWSSGKDSALALYRALNRFDIKALLTVIDSTNNRIPMHGTNLDLLKAQSQSIGIPLVTCDINTEYSEDKYKISLQEIIDKFKSQEISTALFGDIHLLELKISREEKCRQAGLKTDFPLWNNSPQELLHEFIDSGFKAIITCVDGSVLDKTFVGRIIDYDFINDLPDGVDICGENGEYHSFVFDGPIFKESVPCHLGPVSYKEYPCQDLKQNTGFWYIDIYNAPMKKLFFIASFFMLLGMTACSSKDRNVLAVEQLTHRLIPQYADRFVFEIVPEEDRDYYSLESKDGKIHISGNNANSMAAGLNYYLKYYCLTTVSWYADIPVEMPDVLPMVEKPVVVEAKVDNRFFLNYCTYGYSMPFWKWKDWERFIDWMALNGVNMPLAITGQEMVWYKVWKKIGLTDEEIRSYFTGPVYLPWHRMANIDGWNGPLPMQWLESQAELQKKILARERELNMTPVLPAFAGHVPAALKRIHPDANIQYLGKWAGFGDSYRCHFLNPEEPLFAEIQKSFLEEQEKMFGTDHIYGVDPFNEVDPPSWEPEYLAQVSSDMYKSLAAADPDAVWLQMTWMFYHDRKLWTAPRVKALLTGVPSDKLVLLDYHCENVELWKSTEKFHGQPYIWCYLGNFGGNTTLTGNVKESGDRLDNALINGGDNLKGIGSTLEGLDINQFPYEYIFEKAWTIDVNGKDWVERLADRHVGAVSESVREAWQILFEDVFVQVPRTLGILPGYRPKLGDNYNKRISNEYDNATLLRVWELLLEVPSCDRDAFEIDVIMTGRQLLGNYFLDVKKEFDGFYKKRNVPGLKEKASEMREILSDLELLNSFHNRASLDKWIEDARSLGDTDELKNYYEKNARNLITTWGGSLNDYASRTWAGLLNDYYAKRWEIYFDAVIGAAEKGIELNKDELKSRLATFEQEWVDSTTPIQIHREGSLLDTARHLLEKYGPRIEKSLMSLTSTSKRLVSLDVLRGITVCGMILVNNAGACGYAYAPLKHAKWDGFTPADLVFPAFMFIMGVSIYLSLNKSNFDWRVSIARILRRTALIFVSGVSLKWILAFIATGEYNTLENLRIMGVLQRLGICYGIVALLAVTVRHRLFPTIIAVLLVGYYLLQLFGNGFEKCAGNIVSMVDYAVLGKSHMYLGGAQFVDPEGILSTIPAIAQVMIGFLCGKVIVGEKEIRSQIVKLAVWGTSMFVIGYLWSYAAPLNKRLWSPSFVLVTCGITSLIFATLIYIIDDSKRTRWSFPFLVVGVNPLSIYIFSEIAGGLFRKLQWTTISFEGIWQPLFGNYGGSLAYALAFLMFNWLIAFFLYKKHIYIKLMDSTVGALIGLLVSIFLIIKKVSPAYSLILGALIGGLAGGFSLEEVVVSMTEGVKDVSSAVLRILTAGVLSGVLIKTGAAMTISNAIIRFWGEKRVYLALAFATMLLCAVGVFIDVAVITVAPVALSIGRRLGIPTPQLLLVMIGGGKSGNIISPNPNTIIAAENFGADLPSVMFANIIPAIIGLLFTVFVIARFFPVKPRKVHTDEEEMGHDDGLPSLWSSLVAPVVTIFLLALRPLCGITVDPLVALPAGGLCGLICMRQWKNALPSIEFGLQKMSVIAVLLIGTGTIAGVIKDSTLKDYILAMLDHVSMGKDMIAPISGILMSAATASTTAGATLASASFADTILAVGVSSIWGAAMVNAGSTVLDHLPHGSFFHATGGVCDLTFRDRLKLIPYETLIGAVLTLFSIIMYWICRMKRVILAFDSFKGCASSQEIAASARQGIIDVFPECAVVVVPVADGGEGTVEAICSNMSVERVSCRVHDPLMNPMEAAYGITSDGSTAILEMAAASGLPLIPQEKRNPLLTTTWGTGEMIADALQRGCRRIVMGIGGSATNDAGIGLLAALGYRFLDERGEELPPVGESLGKIARVDGSSANKLLCETSFTIACDVNNPFYGSRGAAAVYAPQKGASPDEVDFLEKGMIHYAQVIKETRQMDISEIPGAGAAGGLGGGVLPFLNAELQSGIDIVLDMLRFRETIQGADLIFTGEGKLDKQTGMGKALGGILRYAKEEAVPVIAIGGCVEACEILNEMGFASIFSIQTAPVSLQEAMDRDFALKNIRQVVTQIMRTIQIGTHGMKYHISSSLFVLFCIVLCACNSSSVEKDGIIQPAFDLIERQIGERAADIQLEEIAPENGKETFEVEAKNGILTLRGSSSVAICYAFHTYLREACSAMKTWSGERMELPETWPDFVLKKQTTPYEYRYFLNVCTFGYTTPYWDWERWEKEIDWMALRGVNMPLATVASEAIAERVWLKMGLKEEDIRAFFTGPAHLPWHRMGNLNGWDGPLTDGWQKEQIKLQHKILNRMRELGMEPIAPAFAGFVPTAFAERHPEIQFKHLEWGGFDEKYNAYVLPPETPYFKEIGKLFIEEWEKEFGKNTYYLSDSFNEMKLPVAEGDDDGKHKLLAQYGESIYHSIAAGNPDAVWVTQGWTFGYQHDFWDKASLQALLSRVPDDKMIIIDLGNDYPKWVWGTEQTWKNHDGFYGKKWIFSYVPNFGGKTPMTGDLQMYATSSAEALHSANAGNLVGFGSAPEGLENNEVVYELLADMGWTGDSIDLDSWLPVYCKARYGGCPAAMDSAWQQFRETVYSSLYSYPRFTWQTVVPDTRRISKLDVSDSFLQGVELFLSCADSLESSPLYVNDAIEYASYYLAAKADDCYKRALKEDSLGNRVAAMQQLDRSVEILLDVDKLLASHPLYRLEEWVDMARDWGKTDLEKDAYEANAKRLITTWGGFQEDYAARFWSGLIKDYYIPRMKLYFSEQRADLDRWEENWIKAPWHNTSTSFEDPLQSAIKLVERYKGEMKKVTFLTCVLALCTSTMFAQTLEVTTADMDPVAAGGLVYVIEHAESGSVIEFNFDGEVLDYGEGTGIAIKGKKLTFNGINKKNGKRVTIKGLESLFTVGEASEISLNDLIIDGFKNIAIRLSGNSTLNANNCQFSNNYEPLSSKVNNGGVIRVSGSNAFLKNSLFLKNRCGASYGGGAVCAYGDSELRVENCSFVENEGAAGGAIGVNATAKNPSPRVYIANSTFANNIADDRGGAIYMQTATAVDVFSPVIVNCTFVGNLGSNGGALCVWSKATTTMEPTFVNNLFAENYSNTWMDDESRFDIVAFYMAGQVDANNQPLPQTVLPVCKNNLYVAASDGFFADGSNKAVNFDSDVIFAATEQNPWDEGDESYNHQTSVLSGDMKVAMIAENSIASGAGIAVVDGVEIPTVDQLGNARPATPSVGAVEYSSLSGITGNVKDVVRIWNNGNIVYATGLDKAATAKVYSMTGGLVYEGIIANHSALELPIEEGVYLIVVDKAIQKLIIKMKRVFILSILILFISLCTGSISAGTTKLLSYNIKGHSMTSSRLADIATIINTQNPDIVALQEVDNRSLGIFNHDYLSELAESTGMHSQFFALVGTYYGIGILSKTEPISVKTQSFAPSDTSKDKESRGFLIAEFDNFYFLCTHYSLNADDRDTATEWAIRFARQSDKTVFIAGDFNAQPTYRAMVTFKEYGFSILNNTALYTYPAKDPTSCIDMIISYRPDDSLKYTTTETGVVTEEPGLTLSDVSDHLPVFVTIEAEGSAVYDATSLQEINLIRSADGFSLSNLKTTSQVNIYDISGKLVKTQNVDNATNIVLPEGSRNGLYVIRVSNAYQNSSFKYLYMKAFKYLLIVVFLYQFGNVYAQDTLRIKVMTYNIRFGELASLEELASHIKSFNPDFVALQEIDCKTDRGERAPHQIGRDYISELAYFTKMFGVYGKTIDYKGGYYGIGILSRYPYIDTKKTFLPWPNKAQERRALLEGLFEIGEDTICFASTHLDYQLPKTREAQTAFITEYFNDYRYPVVLGGDFNTAPSSKEIKYNMLENWFLATDYDFTVPAWNPKRKIDYIFARPKQGWKIVRTQTVQSVLSDHLPIVTELEYVKYMKRVFILMMSISAVFMGCSKANEPQGDAGWGGNTEPKENLVVMSYNIKHCAPYYGVSGETTTADVNNVANVIKSKKPDVVLLQEVDYKTTRSLGVDQAKELAELAGYPYYYFFKQKDFQGGAYGAAILSSFQMSEIVNHDLPKEIDGLTITGSNVLGTAKIKFNGIDVYLAVIHLSVTQAERDRQFPVMMEELSSKSDFPIILGGDFNSKPDNSIIGKLEAAGFVRTNTDPKNFTIPSNAPNREIDYIAYRPLEYFNVVSHTVVTGVNASDHLPIISVLKISKPMKTIKYIAAFLPLASLLVSCNDDFLDRYPQDSVTNETYWKTEEQLRAALYPCYETFEYELLIKWAESTAETVIWGDKNSGLSKVSGGKHAYTDGFPFTSYWRYSYGHIHTCNNFLDNYNRAEIDQDVKDVYAAEVKVIRSWVYFMLTTFFGDVPWINHVITSEGAYGPRTPRSEVIDSLMTDLDWAASKLPHERQTGDNVGRIDRWGALAMKARIALQNERYDIAAKAAKEIIDNGPYDLYDYEKLYHLEGDIENNPDNNEAIISSIYVNDIRNNNMSNETCSPVDFIRFNPTKTLVDAYLCIDGMPAKPGLEYYKRTDIKTSPLYKYPEEHYADYFQNRDPRMRMTLFTPGDQWGGGDDGDAEYRRPNDIFQLPRFSSLQPGRNGANGITGFYFKKYNEISIAGNANRSHTNLNVIRYPEVLLIYAEALYKMNGTLTQTEIDETINRLRDRVGMHRMDLKELQQWNLDLWTEIKRERRIELSFDGMRYADIMRWREGELRFGRAITGPSLTVCMNDLGANPYPDTGVDEFGDVIYEKSRAEGGPRYFDPAMHYLWPVPYEERMKNPLLGQNPGWPEMLEKYVFPYIRKWCVVGGLCLAFPWVAYAQQQKISLNIQNVTLKQAMEQIKEQAVVNVAYSKEFVDPNKTVSLKVENVSLQTALTQLFKGTDVGFRFLDNSVLLYNQKEQDSSGAASKEQQIVSVKGTVVDQVTGEPIIGASVAVEGSSKGTSTDLDGKYSLNAPVGSTLKFSYVGYKETKKEVLQAGVLDVSLMESSVSLDDVVVVGYGVQKKVNVTGAVSMVKGDELENRPVANVSAGLQGLLPGVSITSSSGQPGAVPSITIRGVSTINSSTAPLILIDGVSGGDLNLLNPNDVESVSVLKDAASAAIYGARAANGVILITTKQGKRKEKATLTYSGYVGMQTPTALPELVTGRQYMELSNEAMSAAGFSRPYDVDAFEKYDSGMYPNEYSNTDWVNEIFKKHALQTSHSVSVRGGSEKSSYFMSYGYLDQDGLVVGDAFKTKRHNARINVNTEVFDRLKINGNVSFVDYYRNASGFSGTGGVFRLAQRMSPLLPVKWQQQNEMGLWEDTEYWSSGSINNPVYVAKEGGEEKRKSRTLNTIVSADLRIIDGLNLGGQYAANYYFRETDKFTPTLPEYFSDGTPDPANKNMRNSVSQAHQDALTQTLQLTLNFQKQINKHEIGALLGYSQEWYNFSSLSASRKKIPFDGIYVIDAGTEDITNSGTKSSWALRSYFGRVNYAFDGKYLVEANMRIDGTSRFARDNRWGYFPSFSAGWNFSREEFMQFAEPVLSSGKLRASWGELGNQNVGSDYYPYLTPIDSGESYPIGGKQNIGFQQSKLGNANIKWETIRMLNVGVDLTFFNNRLTASFDWFKKDNIDALVKPVYPTVVGITGTANLPYENMGKIENKGWELEIGWRDQIGEVKYNLLFNLSDAKNKIVDLGTSEPRLTNNIRREGDPIDAYYGYLTDGLAQIDDFGGVDSNGKYINPKFAIPKAAEAITQPGDIKYRDISGPGGIPDGEIDEYDKVVFGDPYPHYSYSLRGQLQWRDWDFSFYFQGVGKVNGYLSDEARHCFINDYSIPKVEHLDRWTPNNPDATYPRLYQAQSHNLLFSDYWKEDASYLRLKNVQLGYSIPKKLLNRWKIEGLRLYASADNLLTFTKYFGAYDPEVRESSGDVYPQVKTYVFGLVLSFMHFRKRHRTDSEILKYISGHIDKDINRLLNAESLPMGGCDVPDFDKFGVYESLAQRIGRSERRNVWTVCKWACAIALVLLNVGYLAYQNIDLSKPVYKEVCSLKGERLVVLLEDGTRVWLNADSKLVYPEQFAKDKREVSLVGEAYFEVKKDISKPFMVQADEMNIRVTGTSFNVSGYPTDSVVTTTLDEGGIVISYPYAEKSGTYQMAPGQTAIYEKGSRLCKVMKNEYYKDASVWKENKLIFRNAPLEEVLTTLSRQFDVSFDIRSEKIAAFTYNFTCKLNNLSGIFEMMSAITPIKFNEISENVYAVKEKMDDSALTHQLKQGNQLAFTILYDTYSEQVYRLAFKYLCNKELAEDAVQNLFMKVWIKRTSLDESRPLNHFLFTVLKNDLLTILRDPKNHIFVLDDCLELLERIDGGNQDDEDMDKEQLDLVRHAIEQLSPQRRKIFSLKISGKYSNQEIADKLNLSVNTIKFQYSQSLKQIKEIVRKCAISLLMMKNYYINPLSIWLSIQYSRYICRTNYTQMNYLETERLILRPFAEQDTESLFIILSDVEVNAFLPMFPLKDIEEAKTYLHEKHTAINSGKTLFYYAICLKGNNIPIGYIHVSGGDSYDLGYGLRKEFWHKGICSEACRVVIEKLKHIEIPYITATHDVNNPRSGRVMQAIGMKYRYSYNELWQPKNKWVTFRMYQLNLDGQENRIYKKYWNKYPIHFVETIPKMNKLINSVLLITYLFIVACSDDNIENTPTPFILEKDYYEIRLERSSTSISITNGSGDISLDIENEDVLQAIYSKYNDDWEEDNLKGHINLYGMQKGVTTLTIIDNVTNDVEKVEVKVTDCYLAYTISESNYPALEANTTLFFVNNQEKECYIFAIDKIHGRLSEQPIAKGSYEFFVTPDDALPQFNGIPGLHLNITDNDATTKSYDFQINANSSQVLSVIQAYLGVEWGKLFDSVHTKSPAPIDMTMKLTIPNTDYQITGMLSTTSIPEHILDMENRYCVIMGGGIGSRFWPFSRNNRPKQFLDFFGIGRSLLQMSYDRFIKIIPKDHIFIVTNEIYVDLVKEQLPDIAEENILLEPTRRNTAPCIAWASYHIQALNPNANIVVAPSDHLILKEDEFAQCVNRGLDFVSKYPALLTLGIKPNRPETGYGYIQIGEDAEDNIKTVKTFTEKPNLEFAKMFVESGEFFWNSGIFIWNVQTIIKAFQRFLPDISNRFEENIKVFNTPEEKHFIDENFAACPSISIDFGIMEKASNVFVLCAEFGWSDLGSWSALYDHSPKNKDENVTQNCKALLYNTTGSVIAVKGEKLVVVEGLHDYIIAEADNVLLICPKSEEQKIKQFVTDAKMAYDDSFIMDRYEEMLSRYKTDLDDAQVAAAVEKIVRDNLATNSTPDVYKFLFSCIDLTSLHTEDNTDSITKFTKRVNDFEEEHPEMPSVAAICVYPNFAGTVRANLDVSSVNIAAVSGGFPTSQTFTEVKVAETALALGDGADEIDIVINVGNFLGGNYEEMCQEIEELKQTCRDAHLKVILETGALKTASNIKKASLLSIYSGADFIKTSTGKSEPAATLEAAYVMCQAIKEYYEQTGTMIGFKPAGGISTTADAVKYYCVVKEVLGEKWLTNEYFRIGASRLANNLLSDIWGNPTKFFMTIKEAQEQVDKWIKSVGVRYFSELTNMAILTEEVGEVARIISRRYGDQSFKSGEENSDLSDELCDVFWVLLCLANQTGVDLTSAFEKNMEKKTNRDKTRHINNPKLTKNGMRVVVQRVKRASVRIGGELHSSIEAGLLILLGVEDSDESSDIEWLVKKCANLRIFDDGNGVMNRSLIDMNGDVLIVSQFTLMASTKKGNRPSYIRAAGHEHAVPMYEAFCRRFSEEISKTVATGVFGADMQVELVNDGPVTICMDTKNKEMIDKNENIKNKLALLPDTPGVYQYFDKTGKIIYVGKAKNLKRRVSSYFNKVHDSPKTNILVKNIYDLQYIVVKTEEDALHLENSLIKAYKPRYNVLLKDDKTYPWICLRNEHFPRVFLTRKVYKDGSKYYGPYANVHLAKTVLGLIRELYPIRTCNYALTPENIEKNRFRVCLQYHIKNCKGCCVGKISEQEYNGYIEQVRQILNGDIHQLSNHLLEEMSALSAELRFEEAQVVKEKYDLIEKYKAKSVIVNPALHEIDVFSYDEDEGVAFVNYMHVRGGSIVQSITIEYKKKLDESASEILSLGIAELRSRFGSRAKEALVPFLPESDFVDLEFVVPQRGDKRKLLAVSEQNVKQYKVDRLKQSEKLNPEQRVMRILTRIQQDFRLPELPWHMECFDNSNIQGTNPVASCVVFKKAKPSKKDYRHFDIKTVVGPDDFASMREIIYRRYRRLLDEGEELPQLIIVDGGKGQLSAALESIDALGLRGKVSIVGIAKRLEEIYFPGDSLPLYIDKNSESLRVIQHMRDEAHRFGITFHRNKRSKGQVKSALDSIPGIGPKSRDLLLSHFKSVKRIKEASESDLMAVVGTAKAKIIKKYLIMSVEIIKSKIRDVVDFPQKGIVFRDLTTVFKDADCLRELSDMLTAIYAEKGITKVVGIESRGFIMGPILATRIGAGFVPMRKPGKLPAETWQESYTKEYGVDVIEIHKDALCENDVVLLHDDLLATGGTMLAAYNLVKRFNPKKVYVNFLVELEFLKGRNLFPNDVEIESLIKYMDFNYDVIVVGAGHAGCEAACASANLGSKTLLITMDMNKIAQMSCNPAVGGIAKGQIVREIDALGGFMGIVTDETAIQFRMLNRSKGPAMWSPRSQSDRTKFIATWRSILENTENLYMWQDSVNQILVKDGRVTGVVTDMNVTFTAKCVVLTTGTFMNGLMHIGRTRLQGGRISEPASYGITEQLVELGFTAGRMKTGTPVRIDGRSIHFEEATEQRGEDDFHKFSFLDFQPRPLKQRSCWTIYTNEQVHDILRAGLPDSPLYNGQIQSIGPRYCPSIETKIVTFPDKTEHQLFLEPEGETTQEYYLNGFSSSLPLDIQIKALQEIPALRDVRIYRPGYAIEYDYFDPTQLNHNLETKQISNLFFAGQINGTTGYEEAGGQGLIAGINAHINCHGGAPFTLGRDEAYIGVLIDDLVTKGVDEPYRMFTSRAEYRILLRQDDADMRLTERAYRLGLAKRERYDLLTAKRDSVDRLIRFAQNYSIKPAYINEGLEALGTAPLKQGVRLIDLILRPQLDMAKLSTLVPALKQEISVIKNRREEIVEAAEIKMKYQGYIDREKMIADKISRLEHIRIRGKFDYSQIHALSTEARQKLERIDPETIAQASRIPGISPSDINILLLLVGRMAVSYFAEDVKMPAIKKRETTDWIRRVASGYGKKCGDIAYIFCSDEKILEVNKAYLQHDYYTDVITFDYTEGDKIGGDIFISVDTVRSNAEQFGTDYDEELHRIIIHGVLHLCGINDKGPGEREMMTRHENEALKLRMVLNYIWIAFFVIAFVVAVVQTFVYGNTGIWTDIMNASFSSARSAFDISLGLTGVLTLWLGLMKIGERGGVVAVLSRWISPLFSRLFPGVPKGHPALGSMFMNVSANMLGLDNAATPLGLKAMRELQELNPKKDTATDAMLMFLVLNASGLTLIPIGVMTYRAQMGAANPSDVFLPILIATFMATFVGLLALCIKQRINIFDRVILLWGLGLTAFVGGVFYYFSSLPEEKISSYSAFAANSILFTIIVIFIVAGFVKRINVYDAFIEGAKEGFKTAVMIIPYLVAILVAIGIFRASGAMDYIVEGFATVFGWLGIDTEFVGALPTALMKSLSGSGSRGMMVDAMSAYGVDSFVGRVACTVQGSTDTTFYILAVYFGSVGVRKTRYAVGYALLADVIGAISAITVSYFFFKMHTAQDIEQAIRAEANPDKVKTLSGFFKTGKGEYGEQDIFIGIPVPVTRSIVKQYLDTPLDQLEILLHNPVHELRMAALLCMVEQFKKADANRREAIYHTYLSNTAYINNWDLVDLSAAQIVGGYLEEQDHTPLYQLAQSSLIWEQRISIVSTWQWIRKGRFDDTLAIADILLYNKHDLIRKAVGWMLREVGKKDKIRLCTFLDTRYRDMPRTMAIEKFSPEERRHYMQKMGTPPIFLAGTPRNATGHSKGKREIHYPIPVIESIHTSPLCFEQNIGEKEMIDKNLTIDGKGKTISVAEPGVSNYRIFKIGLYEPEDGAELISLTLKNCTLYGGDGTALVDTETTMATWSATILVGANGTLTGENLLFDKAKNGYAAGIMACGDITLTNCTFQNLSGTKAGGALYTNKGVTGRFTNCTFTENTATNYGGAVEQNNNVTDGALKIVNTTFMNNAAKGGGALLTWMGDVTVENCSFEHNEATGTSGGAWYASLKDAVTYKVAGCYFGENLSAAHGGAILSTSKNATFTNCTFYKNEITGANNGGGALALQGDATIYNCTFVDNKSVHETYGSGIHIASKAIVQIYNSILVRGIGGPDIYTHNDCVISGTHNIYGTALEGTPVTTDEFVDNVVYTDQKLFAEDEPIPALNEGTTKNIAIAADGIAAGAGIVVEGVPTVDQRGKSRSATNPAIGSYEVEKATSIERVAVEKLFWPNPAQGNINLTEGVSNIAIYDLQGSLVKEVAMPAQSVSVEGLNPGIYLIRITLNGNEHNHRLVIKMKNKLLLVSCALFLFSGTAFAENLLVTKTSGGADEEGTLPYVVRMHRAGRSSSCLSVMRPPLRFPKRFMKNSNFFLLAVTAATVVSCGTHPSSYTINGMVSDTTLNGNKVYLTDMASRNVLDSAVIANGKFTFTGKADTALICQIQSRPYRMELVLENGDIAVEMGETDKRSGTPLNDSFALFMSDMDSLQNTIIAKQQEIMQKGLSEEELREAWQDFQTNTIMPEFNRVMSENFDRNKDNAVGAWAIANWNLEPAQFDSVLNLAGETLKANPLIKMMIQQQEILKKTAEGAMFTDFTIEQPDGSKVSLSDYVGKGKYVLVDFWASWCGPCRAEIPNIKELYDKYHSKGLDVLGVAVWDKVEDTQKAIKELGIVWPQIINAQQIPTELYGIQGIPHIILFAPDGTIVARDLREEAMKEKVAEVMKKMWLSNSSIGRKVVMSITGLFLVLFLTFHMCMNLVALISPAGYNAVCQFLGANWYALAGTVILAAGAVLHIVYAFWLTLQNRKARGNDRYLVNTRPQTVEWASQNMLVLGIIVLLGLVLHLFNFWYKMQLNEIVGHLPEVNPHDGIALIRETFGCPIYVVIYLIWFVALWFHLTHGFWSAMQTIGINNHVWFNRWKCISNIFATIICLGFAAVAISFYVMSLTGCGTCTLMSTIDSKIPEGPLAEKWTNYKAHQKLVNPANKRRLDIIVVGTGLAGGSAAATLGELGFNVLNFCIQDSPRRAHSIAAQGGINAAKNYQNDGDSVYRLFYDTIKGGDYRAREANVYRLAEVSNNIIDQCVAQGVPFAREYGGQLANRSFGGAQVSRTFYAKGQTGQQLLLGAYASLNRQVKKGTVKQFTRYEMLDLVIIDGRARGIIARNLVTGEIERFAAHAVVIATGGYGNVYFLSTNAMASNGSVAVQCYHKGAYFANPAYAQIHPTCIPAHGEFQSKLTLMSESLRNDGRIWVPKKKEDAEAIRAGKLKPTDIKEEDRDYYLERRYPAFGNLVPRDVASRAAKERCDAGYGVGATGYAVYLDFKESIERLGKQAIQGLDHHVIESLGGEQAAIQIKGKEAVASRYGNLFQMYEKIVDDNPYETPMMIYPASHYTMGGIWVDYELMTSIPGLFAIGEANFSDHGANRLGASALMQGLADGYFVLPYTIQNYLSDQIQVPRFSTDLPEFVEAEKAVKARIARLMNIKGKRSVDSIHKELGRIMVDYVGMGRNKAGLETALEKIEEVKKEFYTNVRIPGEANTLNVELEKALRVEDFLEIGKLMALDALNREESCGGHFREEYQTEEGEAKRDDEHFMYVSCWKYQGEDKKPELLKEELKYEAIKVQQRNYKKMEKTINITLKVWRQKGPKEKGRFEEYKLNGVSTDSSFLEMLDLLNEQLINEGKEPVVFDHDCREGICGMCSLYINGHPHGPDTSVTTCQLHMRKFNDGDVITVEPWRSAGFPVIRDLMVDRRAFDKIQQAGGYISVNTGGAQDANAIPISKIDADEAMDSATCIGCGACVAACKNGSAMLFVSAKVSQFALLPQGRVEAAERARAMVAKMDELGFGNCTNTGACAAECPKNISLTNIARLNREFICAKLKDMRFGTTKSEMKLPFVSTLTFRYLCHYEDKIRFGVAKPETGFPFVSALTFSYLWELFYFLSVMKRGFIYTILLLSILLGSCNHHDTEKAEILYQNGVEMEKRYMPDSAVIFYHKALKRLDESNDNELKSKIYNQLGDLLLEHNIYETARSAYQQALYVSKELEDKSNLSHAYRGIGKYHFLYKDRDSALYYFEKPLEFFPEIKNREERSSVYNNLTSAYKLKNDIKSALECNAKALSLTNDEVKRLRNYAVRGQLFAMQMQYDSALFYLEQASRSEEKSVKASAYFKLADLPEKSGITDSMKYRYLQEAYRLSDSIENMAVSHQIDRQEQIRITSDLKEQSHIRLIVSITVSIIVVLLLSIVVFFIYRKHLKRRNERIFAHKWERQEARAQENENRELQIIDIIRKAGETCSKHFKESNIYTDLYKKINSDKESLSYNEQKSFQTTILKEFDTYLQQVSSIVPLTDNDAFLCALLQLGFSTKECAACRGISSETIRSQRTRIRKKIPQNFLSQGLGIVILGEENLSKRMLLCTYIFFIFVILIFNLKEIYNTKHKNKTKRMKKITSFLISLCIVLGFSEVQSEIKLTTSLELGSDFTFYPKPVASDGKVIVDWGDGTKKEYTVDGMWNKSVNGTQVGDTIRIFSPIQTFDCSDAHVTSVTIIDEPDLTLLDCYKNEIERTNLDISGALNLETLNCYNNPKLLFLNLSAHKKLTTLDCRHDKSNTSDPDDKGGITTIILPSEGSELENITAYNNDISSIDFSGCPNLRYINLEGNALMDINVSSLTNLRRLDIRKNHISNLDVSKNTALEKLYCDDNALTELNVFANTELMDLVCSNNQISNLDLTANINITNLSCDGNLLKKITVSNMPRLKSLKCGDNQLEEIDLSKNLHLQKFWGQNNLFSFLDFYYNQGLNTIDIRNNPRMTPCSLNFMYQTLSGLESASPYVNLFLEGSNAETSSTSIATESKWTVDVTGDGSAVCKDVTATIETSEFGTISLSQPDLVSHELHPIENNTLEAGVPVYITATPIENYQVRYYEINGERINGSIFATTENVTVSAVFVPTASNNYIEMGVESNASLSFGISGIDPETEIEIDWGNGEWQTMTIDNESITRIDGNSKGTTVRINGLIDYFDCSENDLKSLDVSHNAILATLDCYWTGITALDLSKNTALGKLNCSYNSIGTLDLSNNKALFSLSCYNCELGSLDLSNNTELEEAVVKNNELTSLTVSSNTKLLLLDVQNNEQLKSIDASMLTDLEELQCSYTGLTALDVTHNTKLVKLICSNNKLTTLDLSKNTLLERLFCDGNQLTSLDLSNNTKLNYLECSGNGMSACALNDLYYNLPKCSTTPTNVNMFIAGINNPNEAEGSETSMATKKGWKVSVDGDGSGCNEAYITIEPTENGTLELRNSDNEIVNSGSKVIKNTTVTVKGNPDEGFYLKNVWVNGVSVTNGEFVVKMASVVTAAFDEGSSITEIENSGIKIWSTSGIIRVNAENAHVQVYSTSGALVWEGNIYQEKTIDATRGIYIVKVRNAQSTQSKKIVVEMQTVLFHEIIFGPIHSRRLGISLGVNLLPVDGKLCSFDCVYCECGYNAQGVGKSGLPSSDRVEEELKSRLQSMHEAGEKLDVITFAGNGEPTLHPEFEKIIDTTLYLRDHYYPEAKISVLSNATRIHDESVFRALNRVDNNILKLDSLRPETVVLIDNPNDPHFDVNKVVDNLKRFSGNVIIQTMFLRGWHDGKRIDNTVEEELKPWLEALQRISPRSVMVYTIDRKTPEESLEKVSREELEQIADRARALGFEVSVSAMKRTIFILFLFLFLFIPRTKSQIVQESHPAYKHFYHAVIDNDTVLVIELRTFHVFPPEKFKDKKQEKFYWKTVRDVKKTLPYAKLIYSILIETYEYMETLPDDKAREEHMKKMEKEVFQQYKPILKKFTLSQGKMLIKLINRECNQSSYELIKAFLGSFRANFWQFFGKIFGASLKTDWDPEGEDKIIERICILVEQGSLMKKKSVLDLKRISQEEFKRVEKISLTVILDNVRSLNNIGSVFRTADAFRVECIYLCGITATPPHTDIHKTALGAEDSVDWVYFQDTCEAVDNLLAAGYEVYAVEQVEGSISLTNIKLDKNKKYAVVLGNEVKGVQQSVVDKCTGSIEIPQFGTKHSLNVSVTAGLVIWDFFKQLGIMYFIFIENVRIVCTSTWLYMVVFALGLYYLCTKWKLGSYKNDRLMFDVDISKGYVDMPIPEGIDLVSEIERMKREKNAVVLAHYYQSGDLQDIADYVGDSLALAQWAAKTDASILVLCGVHFMGETAKIICPDKKVLIPDMNAGCSLADSCPADAFAEFVKVHPGYKVISYVNTSAAVKAYTDVVVTSSNARQIVESFPADEKIIFGPDKNLGNYINSITGRDMLLWDGACHVHSQFSLEKIVDLKKQYPDALILAHPECKRDILLVADKVGSTAALLRFATQSDCKRFIVATESGILHEMKKNNPDKEFIPAPPNDSTCACNECNFMRLNTMKKLYNTLKYELPEVIVDKEIAEKAIEPIQRMLDISASLGIMEYNFKEIEKKWQKYWKDHHIYQVKEDESKPKYYVLDMFPYPSGAGLHVGHPLGYIASDIYSRYKRLKGFNVLHPMGYDAYGLPAEQYAIQTGQHPAITTEKNINRYREQLDKIGFCYDWSREIRTCDPEYYKWTQWAFIQMFNSYYCNDKQQARPIEELVKTFETTGTEGVNAACSEELSFTSEEWNGKSEKEQQEILMNYRIAYLGDTMVNWCPQLGTVLANDEVSEGVSIRGGYPVEQKVMRQWCLRVSAYAQRLLEGLDKIDWTDSLKETQKNWIGRSEGAEMQFKVVDSDVEFTIFTTRADTVFGVTFMVLAPESDYVKQVVTPDQQEAVNKYLDSIKHRTERERLMDKSVTGVFTGAYAVNPLNNKHIPIYISDYVLAGYGTGAIMAVPAHDSRDYAFAKHFDLPIIPLIEGCDVSEESFDAKEGKMINSCGNGLDLNGMEVKEAIAATKKFIKEKGIGRVKVNYRLRDAIFSRQRYWGEPFPVYYKEGMPYMLDESKLPLELPEVDKFLPTETGEPPLGRAKNWETEEHYPLELCTMPGFAGSSAYYLRYMDPHNDKALVSKKNDEYWRNVDLYIGGTEHATGHLIYSRFWNKFLFDKGVVCEDEPFKKLINQGMIQGRSNFVYRIKDTNTFVSLNKKKDYDTTPIHVDVNIVSNDVLDIEAFKNWRPEFSSAEFILEDDGRYVCGWAVEKMSKSMFNVVNPDDIVEKYGADTLRLYEMFLGPIEQSKPWDTNGIDGVHRFLKKLWNLFYQGDNWIVTDQEPTKEELKSLHKLIKKISWDVENFSYNTSISAFMICVNELTSLKSHNKQILEKVIILLAPFAPHISEELWHELGYDSTVCDARWPEWKEEYLKEDVVTYAISFNGKARYNLEIPADTPREEIEKMVLNHESSVRWLEGKTPKKIIVVPNKIVNIVIMRLPFNSVWYSIKDYLIIIFGLLLYALGWVGFLIPNEITTGGVTGISALIYYGTGIPISVSYFVINVLLLLAAIKVLGLQFCIRTIFSVIVCSSFLSILPLFIKDALVDEQPFMSAIIGGILCGSGIGLVFVSNGSTGGTDIIAAIVNKYKNISFAKMMMYIDFLIIACSYVLFHSVEKMIFGYVVMGVMSYTMDMLINGKRQSVQILVLSDKYEEIATHVNNDIRRGVTVIDGMGWYSKQPKKVLMILAKRNESVKIFRLIKSIDPKAFISQSNVVGVYGEGFDKIKAMNTGKRILWIDYAKSICIYLVLLGHAHASQPVTDFIYTFHMPLFFFLSGCLFSFEKHPNFKEFAIKRFKGLMVPYLWINLITYLFWLFAGRNFGEDATISTTWYSPIIGILLGYSKQMIHNTPMWFFICLYFLEIFYYLLFKPLQKKSKSIKISVLIVIAVIGYTNYAYNPYTLPFCLGTAIVGMVFYGIGNLIVHNIQIIKIKLLHIILVFLTMGIVIFIAHENGYIIMATNNYNNYILFFIGSFAGICMINLSSNFLSLKPVFQNIIIYISKNTLIINSFHLLTFSFLKGIMVFVFHIPVETLYGKIVPNIVFALVSLFSCLPIAYIINKHFPFIIGKKRSPEGMKSYSKFQNYLSLLMFITINILFYFKYLSKISIACGAITSVLYILFIIFLFKYKPTFGRKLVNVGIITFIIATSSLLFFIPKEIFTADRWIIIDLFWDSVSNGLYPYAEKTSIGNYPGAMPFYFLLCYPFYCIREIGFITVISIALLAFHFKRKSVQSYSLFFILSISSLCIYWEIFSRSTILINAVLFTLFLLYLERFRTFSTRQLIWSAVIGGLLFSIRNVFVLPLIVWGLYQLFQEKTSPKKIFLWGFVFLLSFAITFVPFIWLYPDEFWEVNPFSTQSSLVSFHFIVLFVLIAIAGSFFCRNYNDVRFFSVLLLFGIVTIHFIEAVCQYSFTQALFQSKADISYYIFCIPYLLQILADTDYKRLMNPQTMKLVFATNNRHKLEEISAIIGDKIEILGLNDIGCHDDIPETADTFEGNALLKARYVKDKYGYDCFADDTGLQVEALNGEPGVYSARYAGEPSDSEKNIDKLLANLRDAENRKASFVTCIALVTGSEEHVFYGEISGKIIRERRGSSGFGYDSVFVPEGYEETFAEMGEEEKNKISHRARAVKKLSDFFNTLMLKRISGLIGFVILSFTVATYAQLAVGDWQIYTSTGTPVKVIDTPERVYYVSGRSLFGFDKETEEMESYSKNNILNDIDIANIYYNYDKKYLVIVYANSNVDILHDNGKVFNIPDIKNAILTTAKGINDVKFYGDRIYLATDFGIVVLNDKKNEVSESYNYGKKISLIGACDKYWFFVADDGLYYINSDAIKYDIAKWVLLDDVPGTTIYALMPFNDKYLFYSKGGNLHFLDINNGLSLLGTLNMGVMNVDKYYDGFVLRGYVYVAFCKPDIVNGAIQFDGIFNFQNQSDYLVNVLTSSYEKDMSIWALGESGLCHFSMGNNQFVMLKEPFLPNVSNVADPWNLVINDHKLYVSNSGPRRGTEDQYVQTKISVLDQGNWSVIDVGEVPLENGKTGNRIYSSYNMAFDPDDSNTFYIGTWFEGIYKISGTECVGHYTSLNSPLSKGWAMAVPNIVFDRDGNLWIAHAGDVGVSMLPKAKQSIDTDELKASDWYQFGYSEIKNNKYAKLLIPNHSTAKWVVYGDWPGSIFAFDDKGTYNTIADDRTKNIVSFMDQDNKTFTPNYYTCIEEDNNGQIWIGTSSGPIVITNPDHVFSDSFRCTRIKIARNDGTDNADYLLQNINITDIFVDGANRKWIGTRESGLYLVSADGSEILNHFTAENSKLPSNHVTEVIVDPVTGVAYIGTTSGLAAYRSDAVQSSDDYSNVYAFPNPVRPDYEGWISVTGLMENSLVKITDTAGNLFFQGYSNGGQISWDGRDRSGNRVKTGVYLVFASSGGSSKQSGVVTKILVVNMHPLRLFEYCPRCGSHRFQENDASSKRCEDCGFVYYLNPKASVAAFVMDRQSRILVCRRAFDPSKGMLDLPGGFTECGETVEEAVVRELSEEIGWKPKQMKYLCSFPNVYRYSGFDVHTMDLFFLCRSDEDMSDLKAHDDVAECFWLRREEIEPEKFAFQSIRKAVDRLLKDDKYWVKDMEFIAGLSEWGYFGLFIAAFLAGSIIPFSSEAVLGLLLIAGYDSWGCVFSATLGNWLGGVTCYYIGYLGKTEWIHTYLKIPEEKLSKMQRFLKGKGSLFGFFVFIPVIGDIMIVALGLLRANPLGTLLSMMVGKFSRYYLVVIGINYLKEWFPNLFMNLKSFINNKYTLVGSIVFYLTGVYLTSRFATYLPCEGSPGILFPSAERWLSSPLSNHSVNSILILSGGILLLRINNLFSLIQKHTLLPFLFFLLLEVCSPSLSLLCNGNIMAVVLTTILFSFFSAYQQERAQPAFLMMGIISLCTLFCPEFAYYIPLFIIGFAQIRYFTLKSLLGAFIGFATPFWVLIGIGIMPFSGLSALIPDFTFHIPETLPFNDPQFWTIVLTALLGLFSGTATLYTTFNEKRQTRAYNGFINLLSVYSAMLLIIDYRNYTLYLPVLNMAVAMQAAFFFTNNTKKYGVVLFYLILTLYTGLFVWNLLPVMNILLLGSGGRECALAWKIKQSPKTDKLYIAPGNAGTAAIGTNVAIPATDFDAIGKFAVEKHIDMVVVGPEDPLVKGIYDYFVSCEELKNIPVIGPSKEGARLEGSKEFAKGFMMRHNIPTARYESFTQENLEAGYTFLETLKAPYVLKADGLAAGKGVLIINDLQEAKDELKQMLNGMFGNASKTVVIEEFLSGIECSVFVLTDGKDYRILPVAKDYKRIGEGDTGLNTGGMGAVSPVPFADATFMKKVEERIVKPTIEGLKKENITYKGFIFLGLINVQGEPMVIEYNVRMGDPETEVVMLRIQSDLVDLLEGVAQGTLREKELTEDPRAAVTVMLVSGGYPGSYEKGKEITGLDLVTDSIPFHAGTTFKNGKIVTSGGRVIALSSYGATKEEALANSFKSAKAVSFEGKYFRSDIGADLMNTEKFEIVAKTFQGLEDVLAEELKNLGAEDIEIGRRMVSFHGDKPLLYKTNLACRTALRILKPIYKFEASNPDEVYEKMKAFEWDTLLSPETTFSIDSVTYSDCFKHSKFVTYRAKDAIADYFMEKTGKRPSVRLNGAELVLNLHISHMSCTLSLDSSGESLHKRGYRVGQTEAPINEVLAAGMILKTGWHGETDFIDPMCGSGTILIEAALIATHTYPGIFRKSFAFERWKDFDEELFETLYNDDSHEQEFTHRIYGSDISPRAIDIATKNIKSAGVAKYIDLKIMPIQRYETAPSEQGILITNPPYGERISSSDLFGLYESIGNRLKHVFKGYDAWIISYHKECFDKIGLKPSVKIDLMNGALECEYRKYEIFDGRYKEFKEEGKNLDKREGQTRRTNLRGKAPFDRKRTYDSDRRSDKTERFDRSGKPSFRRDSKQGKPIGKKTFDRPERFKPDGEKSERLHGEAAFRKFVTFKQPSIKPSNDNPKKDSDKPEMSSYEYADRLKETVKKLSDFLSLEELHHQRCRGEVLPSEKQLQELISLCRSLIFPGFYGLPDVSKENLLYHTGINTEKLFEVLVKQISAGLLFQKNTDHTDSDLKRLQESAEQKAIDFITFLPEMRHILSTDVTAMYNGDPAAQNKAEVILCYPAIRAICNYRIAHKLLELDVPLIPRIITEMAHSETGIDIHPGAVIGEYFAIDHGTGVVIGATSVIGNRVKLYQGVTLGARSFPLDENNNPIKGIARHPIIEDDVIIYSNATILGRITIGKGAVIGGNIWVTENVAPRERLVQAKAKPMSTVYLSTAYFAPVSYYASFLRYDRIVIEQWCNYTKQTYRNRCHIAGANGLLALSVPIVKPDTIKCPTKDIRISDHGEWRHLHWNAIASAYGSSPFFEYYQDDIRPFFEKRYEFLLDFNEEIRRTVCNLIGIEPHIEYSSSYSEPAPGETDLRDAIHPKKRKAETILPVQPKPYYQVFSEKYGFQPDLSIIDLLMNIGPESILILQNAMKKETIRTIFFTVIIIIGSVWFIRFFIIEPYRITPGQMENSLLPGDRLWVDKWSFRWGNRNPKYRDVLVFELPEIAQTQSGVTEIAIARCIGLPGDTIKSTGNKLFVNHKPVAQPPLILEAYLSPDSLEHRVNRMMRQNNSFFVEQGKLKDSRLLFLSRYDYEKVRRQLSADSLLYPVFLKRDFYEVALPRKNEQIHITPQNAEFLYRILTRYENRKVEYDNGKIYENGKELTSCRLTQSYYWVIGDNRAGMSDSRSFGVLPHSHLIGKGVCIGYSRNPEKPFWQSLRTDRFFKTELMNQTTTNDKYSLAERLKRVKKTRWIRFSIVALLYIGWTIWLNNYYVLFGLLLLIDIYLTQYIPWGWWKTSKNPVVRTVMEWVDAIVYALVLVYFIFIFVFQNYQIPSSSLEKSLLVGDFLLVSKMSYGPRVPNTPLHFPLAQHTIPLLNTKSYIEWPQWDYHRLKGFGPVKRNDIVVFNFPAGDTVAVKQPNPDYYTLCFLEGREAVNRNKALYGDIIYRPVDRRENYVKRCVGLPGDTFSIVNNDIYIDGVKQPRPKNMQLNYLVRTNGRYLGNNDFEKWGISVEDRVPIDVSSLNARMNLESWGLLPNPDGSMNPVYELPLTQAMIDMMKKDPSIEQIVGEPGFFGGQTYPLVRSNTW

SEQ ID NO: 4 - protein, 979683 aa, Barnesiella intestinihominis (residues 326,562-653,122 of 979,683)
  misc_feature (212899)..(212913): Xaa can be any naturally occurring amino acid
  misc_feature (651560)..(651608): Xaa can be any naturally occurring amino acid
  misc_feature (731684)..(731687): Xaa can be any naturally occurring amino acid
  misc_feature (735128)..(735131): Xaa can be any naturally occurring amino acid
  misc_feature (886762)..(886765): Xaa can be any naturally occurring amino acid
TRSDYGPVWIPKKGATLKLTLENLPIYERPIRNYEHNDLQVRDGKIYINGKETDSYTFKMDYYMMLGDNRDKSADSRYWGFVPEDHIVGKPMFVFLSLDKDKGLFDGKIRFNRMFRSVDSLVNMKIALIGYGKMGHAIEEAALSRGHEIVCRIDKDNQEDFDSVSFKSADVAIEFTAPSVAVDNYRRAFAAGVPVVSGTTGWLEHLPEIREACEKGQTFFYASNFSLGVNIFFAVNKYLAGIMNHFPQYSVEIEEIHHIHKLDHPSGTAITLAEDIIGQLDAKHSWSENMPVADDSIHITARREGEIPGTHTVAYDSAVDTIRITHEAKNRKGFALGAVVAAEFTVGKKGFLTMQDLFSFLKMRFGITKSEMKLPFVSTLTFRYLCHYKDKIRFGIAKPEKRFPFASALIFYYLCIICKLNKPCMEKLMQYIWQHRLFDHTKLVTTDGRKLRIIDNGQLNTDSGPDFFNAKISIDGCVWAGNVEMHRRASDWRRHNHHLDPAYDSVVLHVVEVADTPVYRTNGEEIPTLVLSCSPSFRSDYETLVSHSSSQSCAPHIAELGPIVLSDWISSLAIERLQSKSQRLHDWLDLYKGNWEEVCYVVVSRSMGFGINSDAFERLARSLPLRFMQKHADSLSQVEAFLFGQAGLLAEGECPGDDYYARLVNEYAFLKNKFGLTPINRDSWKFFRLRPANFPHRRLAMLAQYIHRGFNLFSRICEAGNEEELRRIFKVELSGYWTTHYLFGHVSPESPVVLGESAIDIVLINAVAPLLYAYGMYVGNEDMTDRALSLLESLRPEKNSIVRRFSDIGIRVTNAMESQAVIQLNNEYCQTHKCLYCRIGHKLLSRSAMKLGMKSIQGTKTEQNLLKAFAGESQARNRYTLFAQKAKEEGYEQIMGIFAETAEQELAHATRFFKFMQGGMVSITAEYPAGRIGNTAENLLEAAEGEKLEWSALYNDFESVAIDEGFKDVATAFKMISEVEAFHEWRYRKLLERLENGSIFKREAPIRWQCRNCGYIYEGSVAPARCPACLEPRSFFEPARDNYMIQKFDFLIIGSGIAGMSFALKVAHKGKVALICKTELEEANTYFAQGGVASVTNTLVDNFEKHIEDTMIAGDWLSDRAAVEKVVKEAPSQIKELISWGVDFDKNEKGEFDLHREGGHSEFRILHHKDNTGAEIQDSLIRAVKQHPNITIFEKHFAIEILTQHHLGVTVTRQTPDIECYGAYVLDLKTGKVDTFLSKVTLMATGGVGAIYQTTTNPLVATGDGIAMVYRAKGTVKDMEFIQFHPTALYHPGDRPSFLITEAMRGYGAVLRTLDGEEFMQKYDPRLSLAPRDIVARAIDNEMKNRGDDHVYLDVTHKDPEETKKHFPNIYEKCLGLGIDITRDYIPVAPAAHYLCGGIKVDLDARSSINRLYAVGECACTGLHGGNRLASNSLIEAVVYADAAAKHSLKVIDNFSYQENIPEWNDEGTQSPEEMVLITQSVKEVGQIMSTYVGIVRSDLRLKRAWDRLDILYEETESLFKRSKASKEICELRNMINTGYLVMRQAMDRKESRGLHYTIDYPHTDNTPQMKMIIGFDAKRANANFTGLGNYSRFMVDTMATYGDEHKYRMYIPKQCKNASYDSLLKHKNVSSILPRSSVMKRFRALWRTFFIKRGLLQDGVQLYHGLSNELPVGIHRTGIRSVVTIHDLIFLRYPQYYHRLDRIIYNRKFNYACRKADRIVAVSECTKRDIVKFYGISPEKIDVVYQGCDPVFARPVSKKEKDRVRAAYGLPERFILSVGTIEERKNLLLAVKAVEKLDDVHLVAIGKSTDYAKKVQDYVEAHGLENRVHIIHNLKFGDLPILYHLASLFVYPSRFEGFGIPIVEALSAGVPVIASTGSCLEEAGGEHSIYVDPDDVEGMANAMKKVLADEHLRREMIEKGKEYVVRFDPKTLADEMNAVYLKCFDDKTFTEDRFVQTSSNKRTKISHYLPFFMSEKQAIIVIPVYTTQLTVSEHAALRQCFDILSSYPKCFVKPESLDITSLVRDYPANHIVPFPDTYFKGIAGYNRLMMSPEFYETFAQWEYILIYQTDAWVFSDRLSEWCSKGYDYIGAPWIPKPKYRKLYYRIFNFLKRVFCYISGSSDYSRIYYRVGNGGLSLRRTQLFAQIAREMVSEIDCYLSHPRTDFYNEDIFWSLEVNRKKERLKIPDWKEALRFSFDKNPSECYALNDRKLPFGCHGWSKKKMLPFWKQHISNIMKILFFSHGKRANGGAERCLLDLVKGLKQARESWEIYVVFPAKDELWEMTRPYLSGYAFIRQPWWLVRPKKRNWRKRLLFNLKKHSAIRKTRDYIREIKPDITITNTLATPIGAIASHAENIPHDWFIHEIPELARNLTYLFCEDSCLEKISSLSQRILVPSDFAGKYYTNKLSSPEKIDVVYQSVEVNPPKRTEPDQSFTIGMLGNFEPNKGQHIAIEALREVVKKYPDTRLLLIGGNNSRYAQELEKRITEYNLRQNVSIVAHTVHPHDYLIQADAALVCSGFECFGRVIVEGLKCGLPVIVPDKPFGQELIKEGYNGFLYNRESSGDLAKKIILLRQTGHLPEMKQNALKSVENRFSIPTFAEEFISIINSKKAMPPKVSVVIPVYNVGKQLEKCLDSVVAQTFPDIEIIVVNDGSTDNSPEIIARYADKDSRIVVIDKSNEGLAYARKSGIEAAQGEYIQHLDGDDFLEPDAIELLYNKAIEDAADMVVFPFWFDYVDEKKKRSSRPAPGVYDSVSFFQSMAFCRNYWSVCSYLHKRSLYAEVHFEKGLNYGEDAYLASQLTYFANKIVVLESHPLLHYVIRNDSISFGSFSEKKARDIELYPQLQRRFYQDKPTYPQVEEALANVELGAIVLLLSKRWFQEAPRLARRAMEIEKQFPDLLHRRPARRYRKLLKAYARSEFWGKLAARYYLLTRKIKMPAVSIVIPVYNIGKYLEKCLDSVVAQTFPDIEIIVVNDGSTDNSPEIIAGYADKDSRIVVIDKSNEGLAYARKSGIEAARGTYIYHLDGDDYLELDAIELLYRKAKEEDADMVVFPFSLDYIESGKSERSIEIADEHFTNTEFFSAIAFSKAHWGVWSYLHKRSLYANGVTFHKGLNYGEDVFLTTQLVYFSSRISVLKSKPLLHYIIRESSITNSRFNEKKARDILLYPSLVNDFLKDKPEYSSLQKELGAIRIQANNTLLSKRWFKDARTLSRESHAILKQYPDLKRIPQIKAFHKLFTLYARSGLLGRLYAQYYICKKKIKMQPSVSVIIPVYNIEKHLEKCLDSVIGQTLKDIEIIVVNDGSTDNSLDIITQYARKDSRIVIVDKPNEGLAYARKSGIEAAHGKYVQHLDGDDFLEPDACELLFKRAEETDADIVIMRFLIDSPRGQKEPSFWTQDEYNNISAIHTMAHEDYRWNLVFLFQRRDLHAVPIDYLQNLTYGEDAYQSIQIAYRSKKIVTLRDKPLYHYVIRESSVTQTGMTRKKAENVLLFPNLIETFLEGTPENRQFTEDIVYIRFRAYFLLLLKNWREGMTERCRFMAESLAKYPALEQLEEVRRFTKLIRLYARWPWLGKLYTDYYVHKGKIKAMQPSVSVIVPVYNIEQYIGKCLDSIIGQTLKEIEIIVVDDGSTDDSSRIIDRYARTDSRIVAIHKTNGGVVSARNCGIAQATGLYILFVDGDDHLAPDACERLLRKAQATSTDMVIMRFDIEYPQHKEEPRFWSQDEYDPVTAIHTMAHEEFRWSLWSRLMRKELFDRPVDCPPQLIFGEDAYQITQLTYRAQKIVTLRDKILYHYTVRDSSVSQHAMTQQKAESIELYPQFIERFLQQTPDNEMFREDIVYIKFQAYLILLLKNWETGMKARCRFMSRSLKQYPRLKEISEVKRFTKLIHLYSFSSILGKLYMKYYIRKGKIRIMDNLHIFFALNDSYTSHYCVTMVSVLTNTPNRHCHFYLLTDYISEKNKRRFSRVEKQYANCSIHYQLITEKIFDSFHRNIDYLVSPVSYYRYIIPELYPQLDKALYLDGDLVVNGSLEKLWDTDITDYLCAGAHDLWVENINYKPQIGFSSDELYINAGVLLLNIPKMREEKIYEKLCETTISLGKQIQFQDQDIINIVCRGRVKELPERYNFTTENAIKHPEERDRAVIVHYTGKMKPWSIWDCPNPQSRLYFDYLKKTPYKNDIWSYRLKRSKYKIVRRFKKIFGIKSRMACLFQKIVSFDKESYFCIETINIKLSFHSMNFVEELKWRGMVHTMMPGTEELFEKGIVTAYLGIDPTADSLHIGHLCGVMMLRHFQRCGHKPIALLGGATGMIGDPSGKSQERNLLDENTLRHNQECIKKQLSKFLDFDSDAPNHAELVNNYDWMKDFSFLDFARTVGKHITVNYMMAKDSVQKRLNGEARDGLSFTEFTYQLLQGYDFLHLYETKNCKLQLGGSDQWGNITTGAELIRRTNGGEVFALTCPLVTKADGTKFGKTESGNVWLDARYTSPYKFYQFWLNVSDEDAKRYIKIFTSISKEEIEALSAEHDEAPHLRVLQKRLAKEVTVMVHSEADYEAAVEASNILFGNSTSEQLHKLDEDTLLAVFEGVPQFEISRNTVLAGISAVELTTEVAAIFPSKGEMRKLTQGGGVSINKEKLAAPDTKIDATYLLNNKYIIVQRGKKNYYLLIAKMGKNEPEAKQWFAIRVTYSREMALKEYLDRCRMESFIPMSYKEVIKGERKVRKLVPVIHNLVFVRSTREKLDEIKRDISLKVPIRYIMDRETRRPLVVPDRQMHSFIAVAGAYDEQIVYLDPTIVSLREGDRVRIVGGVFSGVEGIFIRIKGDRRVVVSIEGVMAVATAFVHPSLIEPVLQKMKLLMKRAFTVVLAAVLLFGCGEDNNKTGGNELTPQENKAKLEQCAMEVLGKINPQDHKTLVETIDAFAYKADYGLFEDEIGPTPGEGIEPNPMGMMSVIRKAVTTYNPVVLSVLATEVDYIAIPTGIYTFDEVAREWVETPSAEVLEFVFEVEGVESSISIRKSGKETQIQTDENTIVFVPEHVTMTVNKGADKLAELSVNNTTLDINSLKFDSEIALKTNADYTWAVHVDISPSEAVASASMEIASANIVSVVAGLQLDASKVNPQMTEDDLIASILSATTTSVVNSQLMVAGTAPKIQEMIYALNNINASTDKEYAIAEAAVYNQYMDVNMQYTGDGVPFASVEAQPYLEYEYSYGDTHYEYYEVEPVIVFASDNSRYSFEEYFNEADFGNVLQSVMTLCDQFVSFVKYCKMSKCAYILLISIVTLGSCKVKWDFEVEDFEPKIVVDGWIESGNVAYVCLSQTRPLNSVVDSLAFSEIPIRWAKVTVSDGQTTEVLTGRIDTDYTPPFIYRGSMMTGEPGKTYTLTVEYSGQTVTAVTTIPRPVPLSDIKVTRSADNDTLFQISAYINDDSSEKNYYKFFTRVTNKEGRFYSSFLGTIDDAIVKDSQTAIPVYKGVHFTYTTKFIPFYSIDDTVQVKFTQIPQHGFDFWNSYENEITNGQNPLFPSNTNLKSNVQGGLGIWCGYGVKMYDLIVRRDCQEMYQKITIFLLVALNCFSSFSQSVEKKDTTDTRHTLKEVEITAWQQRKILSGLLSGKIKLNVAELNTLPRFLGETDALRTMKLMPGVLTTGELNSGFYVRGSESSHNQILLNGAPIYNAMHMLGFFSVFNSGHMNTFTLYKSHLDASKGGRLSATLDMQTRDTLVSKPTVSGNIGIIASQATVALPLGKKVSVYLSGRKTYLGLLVKPLTTKMTDTPVDYDFEDYNATFVFQPSEKDKVTANFYYGSDYLDIETGIYQTEGRIKWSNIAASILWNRPLGRIGEMTHTFYITRYKNRLSISQNQFTAWLPSEITDYGYKNIFSFREEKFLGTYGLEYVYHHMYPQIVETQGAYTIHTDPDSRLYRIHEGALFINGKYFFSPRLSAEAGLRYSGTAQFGKFNYHTYRQGEIIDTQTYGKGELIKFYGGFEPRIALYFLPGSNQRISLSYNLTRQYIGQVSSSSIGFPTDFWMPASRNIPPQRAHSFSAGYSIALDQDNYEFSSELYYKRLHNQMESAGALIDMISQQYIIEDKIYIGGGYNYGMELMLRKNRGRLTGWIGYALGWAYRHTAQINDGKPYPAKQDRRHDLSIVANYRINRRWDCSAVFVYATGNALTMPESMYLVGENAVCEYGPHNGGRMPAYHRLDLSANYWISKKKNTEQVINISLYNAYNRNNPAYLAVDIIQDKDKNGKKDQLIIRKRGKSIYGIIPSISYSFKFMKKLLSAILLFPVRFYKACISPMLPPSCRYVPTCSQYAIEAIQIHGPLKGLWLAIKRILSCHPWGGSGYDPVPIKTPTDIHTHHDHYGAIISTTPEEFHPEPGKFYSVGIHPWSLTSRSKETFPLLETIVRNEQVVAIGETGLDRLKSGVGYEEQSEYFKHHIYLSEKWHKPLVIHAVKAYDDIIRIHKAERPKQLWIIHGFRGKPETARQLIREGLYLSFGEYYNHESLKSVPLDRLFLETDEGNMPIDKLYRKAARIRNLSTHRLRKSIKENISRIFTFPQQSRQMNDHKLPKNEKLCSRTAIDRLFAEGSSFIVYPIRVVYRIDDSESAPPRFFINIPKRNFKRAVKRVYLRRRIREAYRLNKQILTEPLSRQSRTAHLAFLYLDKNLNDFHFIEKKVIEILERLARKIESQQTPSMKIKKILVSQPKPSSEKSPYYDIAEKYGVNIVFRPFIKVEGLTSKEFRQQKISIPEYTAVIFTARTAIDHFFRLCEELRVTIPETMKYFCTTEAIALYLQKYIIYRKRKIFFGNSGKLDDLVPSLLKHSGEKFLFPVSDVHKEQTSVLEKHKINYTKAIMYRTVSNDFGPDEPFDYDMLLFFSPSGIKSLTKNFPDFKQDDIKIGTFGPTTAQAVRDAGLRLDIEAPSPGAPSMTAALDLFLKEQSKKKMPVPAAHTATPADTAQAQSPAGTPEVFVPRYIHGFERSTPLKETDPLKDLQETIIAIPEGFPSEKIPETPMNDPVIVGLVLIVFLLFAFTFKKGIKYLGEVLRNSLNVKERQNLFDDTTVRETQLRAVLLIMTFISEGFCLFELVSRHIPSLSEMIGIGICCGGVIAFCYYYFQKWIYTGIGRLFTDATHTRKWIDSFVSINSLIGIPLSLSILAMTFIPPLEKIMFVTAVFIYLISRILFIYKGFKIFYRNILDLFYFIVYLCALEITPLFWVYRSSILIYNFVELKIQQLMKKIKSVCVYCASSSKINPRYFEAARETGRLLAQNGMRCVCGAGNQGLMGTLADSVLENGGEVLGVIPRFMIDEGWCHKGLTETIVTADMHERKERMAQEADAVIALPGGCGTMEELFEIITWKQLGLFLNPIVILNIDGYYNPLIEMLHNAIGENFMRQEHARMWQVAQTPQEAVDAIQNMPVWDKNIRKIAAIMKILITGAGGFIGGFIVEEALSRGYETWAGVRKTTSREHLSDPAIRFIDFNYGNKKILTDQLLSHKREYGAWDYIVYNLGVTKCKNPDDFDRINYGFVKNFTEALVETEMVPKQFIMTSSLGAWGVGDEKNFTPIRPTDTPHPNTRYGKSKLKAERHLESLEGFPYVVMRPTGVYGPYERDYYLMMKSIKYGFDFIVGFKPQLITFIYVKDLVQAIFKAIDRGVVRRGYFLSEGKAYTSSQFRRYVATALGKRRVVPVKIPVWLLWVVSVIAEKGAIVLGKTSTLNRDKFRIMKQRNWICDISDAQNELGFSPQYSLERGVNECVKWYRENKWLMKRYKLLNNVLGWVVFVIAAVTYILTLESTASFWDCGEFIASGYKLEVGHPPGNPIFMLTARFFANFASSPSEVAYMVNLMSGLLSAATILLLFWTITRLAQKIVLRDGETEETMSLGQMIAILGCGLVGALAYAWSDTFWFSAVEGEVYAYSSFCTALVFWLILKWESVADLPYANRYIILIAYIIGVSIAVHLLNLLCIPAIVLVYYYRKYKNTDLKGSLIALLVSFVLIVLLLYGLVPGFVEVASWVELLFVNVFHLPFNSGVVFYFFLIVGVIAWAIYETYAQRSDKLIKISFLISIVLVGIPFIGDGYIIGIVLTAALAYYLFTRKKLAVVAMNTILLSLFVIFIGYSSYALIVIRSTANTPMDQNSPEDIFSLGGYLNREQYGDRPLFYGQTFPAEIARDANGTAISTKGKAIWKKKLKTSEDEADRYIVTGYNEHYEYQPELNMLFPRMYSDKSEHISAYKEWTNFKGRPVQVRTSEGTKTVMKPTFAENLAFFLDYQLNYMYWRYFMWNFAGRQNDIQGHGEVQNGNWISGFNFIDKHIAGDQTNLPDDLKNNAGRNVFYMLPLLLGLIGLFYQAFSGKKGIESFWVTFFLFFMTGIAIVIYLNQTPYQPRERDYAYAGSFYAFAIWIGLGVAAVWRGLNYLLKTTDEKPVSTITAAVAALLCLCVPLQMVSQTWDDHDRSGRYVCRDFGMNYLSSVDENGIIFTNGDNDTFPLWYVQEVEGYRTDVRVCNLSYLQTDWYIDQMKRPAYESAPLPISADESKYAYDVRSYNYVINRLADSITVSDGLDYLYSDEDWTKDVPGYGKLNHLPTNKLYIPVNADAAVASGTVAPELKDSIVSRIVPDFTNKRGFTMSEIASLDIINTNAMQGWKRPVYFAVTVGSSYYLGLEDYFSRTGLAYQVVPLKGVSNNIDTDKMYDNMVNKFRWGGIDKATPEHPLYLDENVRRMCNTHRMMFGDLVVQLIAEGKTDKALTALDLIMEKIPGWQVTHDLTSISLAQSYLDLGEKTKGEALLTEILDNSAGYLNWYKDLTSGQLRSVGSDYQKHLYIIQAIHEMSTSYELPELQKRIEEKFAIREMFIEQPPFFYRMLFPETIWRIPGDKKTVYLTFDDGPIPQVTPWVLDVLDYYEVKATFFCVGDNVARNPNLFQVIRDRGHQVGNHTMNHVKGMSMSPEKYVRNVMNAHDLIQSRLFRPPHGHMLPGQAKLLKKDFSIIMWDVVTRDYSNKLSGEQVFGNVKRYARNGSIIVFHDSIKAERNLHYALPRTINWLRENGFLFKTLMASCSKPSEWREIIRNEALRIGFDACGFARVEEVDVDMRDSYRQWLASGKQAQMGYLDNYVELRDNPALLYPGARTMICVALNYYPVRFQSGESPRFAYYAYGRDYHDVMRDKLRQLAVFVSSYSGDTGRVCCDTAPVRERYWAVRAGLGFIGKNAQLIIPGKGSFFFLGELITSLDLPPDSPVVARCGDCSRCMDSCPTGALYAPGSVDARLCISCQTIENKGDIAPFVADRMGDRVYGCDTCQQCCPWNKSARPSVHHEFAPSEEFLALDASRFETMTPDDFNRIFRHSAVKRAKYAGLKRNFEIWKKNRKSPIEMRLIIEPTYDAVSRWAANYVVSCINKFKPTEDKPFVLGLPTGSSPLGMYKHLIELNRKGVVSFRNVVTFNMDEYCNLPEDHEQSYHTFMWSNFFSHIDIRPENVNILNGNAADPEEECARYEAKIASYGGIELFLGGVGPDGHIAFNEPGSSLTSRTRVKTLTQDTIIANSRFFGGDTHLVPKTALTVGVGTIMSARNVLIIVNGHNKAKALQQGVEGGISQMWTITALQMHPKSIIVCDDAATAELKVGTYKYFLDIEKNNLDPDSLLMYIILAFPKSNHFLGSTDVYVKILCIFLKIESDSVIFYLFCVEKVMKTNLSSQIKLDRIPKRYYAPDGELELAALTRDEKVYTKIFEGSEEGSVYVAHDVAELIQKCKAEHRHCVLALGSGVGTHAVYAELVRMYQAGEVSFSNVIVFNIGEYYPLAEGAPGTMSLLKELLLDKVNIDPENIHSPGKLVSKEDVYQYCKNYEEEIEACGGIDLALCEIGAVGNLAFNEPGSQLNSSCRLMLLGSDARHMASSQFNSSENVPRSAVTLGISNLMSARRIVCVAWGENKANIVKRTIEGDITDLIPSSFLQTHRRAKIVLDLSAAEALTRISRPWLVTSCEWDEKLIRRAIVWLCKVTGKPILKLTDKDYNDNGLSELVALFGSAYNVNIRIFNSLQHTITGWPGGKPNADDTFRPERAKPYPKRVIVFSPHPDDDVISMGGTLKRLADQKHDVHVAYETSGNIAVGDEDMMRYIMLIDNIAKKFKFDTPELLKKSNEIHKFIGKKKDGESDTPDIRFIKTMIRQGEARTACNYIGIKPQNVHFLNLPFYETGTIKKGDLSEADIQIVKDLIESVKPHQIFVAGDLADPHGTHKVCLDAVLAAIDEIKDEDWMKDCRIWMYRGAWAEWEIDHIEMAVPLSPEELRQKRNSILKHQSQMESAPFLGDDERLFWQRAEDRNKATADLYASLGLASYEAIEAFVEYHPIRMKRIHRILLNLFPIYALLTIGCFSSCRTAHIPEKQETAISGNVLIVFYDAEMGKSDLLSAAKKYGSRIIYSYKNFNGIAITLPSDKGVEESIRYYQRVKGVLSAGMAFKFITAEEAAEFIHHNDNVGFSGFTAAGTPKVVSVALAKKAEAEHAAGRPFQIGVYTGASTSDYIDGALSRAKAIKSRTPYQSHKDSREAINNNEIAYFDLHLSHLAQTLRYGFLGKVDVAVIEATDVTPDGEILLGPGVGATPTFCSLAEKIIIELNHHDPKELRGMHDIYQPLDPPYRREIPIYKPSDRIGVPVVKVDPKKIIGIVESDKRDGVKPFAPVDEVTMKIGNNVCNFLAQQLKSGLIPPQFLPLQSGVGNIANAVLACLGSNPDIPAFEMYTEVVQDAVIDLMKEGKCKFASSCSLTVSDDKLNEVFQNIGFFHDKIILRPGEITNNPEVVRRLGLITMNTALEADIFGNVNSTHVTGTKMMNGIGGSGDFTRNAYLSIFTCPSTAKGGKISAIVPMVSHLDHSEHSVQVLITEQGVADLRGKSPIQRAHAIIENCAHPMYKELLWDYLKLGKGHTPHRLNAAFAFHNEFLKSGDMALTNWADYEMDFSEIIVTIIISLVIIAINALGSKKKQEVKNQQGERPLQDTESHETTDEPWGETRTLTIDDIFKELRKAKEEAEQEDDYIPKAKKKPQTQILERPAEKTPEPIIPSTMPEKEGVAVFTHTVPPITSLQHTDYDTAGENPIDVKDIDWRKAVIASEILNRKYMKNISNKDTFEKREEKKLFIETYGCQMNVADSEVVASIMQMAGYTLCDTIEDSDAIFVNTCSIRDNAEQKVLSRLSYFQSLRKHKKSLVIGVLGCMAERVREQLITENGVDLVVGPDSYLDLPNLVGAAERGEKAVNVELSTTETYREVIPSRIGHNRISGFISIMRGCNNFCSYCIVPYTRGRERSREPESILGELADLKIKGFKEVTLLGQNVNSYRYERPDGTVVDFPALLALVAQSAEGMRVRFATSHPKDMSDETLRIIAAYPNVCRHIHLPVQSGSNRILKLMNRKYTREWYLDRIAAIRRILPDCGITTDMFSGFHSETDADFEETLDLMREVGFDSSFLFKYSERPGTYASKHLPDDIPEEVKIARLQRMIDLQNELSLESNRKDIGKEFEVLVEGFSKRSREQLFGRTSQNKVVVFDKGSHRIGEFVRVKVNDASSATLLGEALEMEKVVREKLWTHSFCAVAAGNFLLFFAFYLLLPVLPMYLSEAFAASRSTAGFILSSYTITALMIRPFAGYMVDTFPRKKLLLICYFTFLLFFGGYLLAGTLLLFAIIRAGHGIAFGLLTVSNSTVAIDVMPSSRRGEGIGYYGVSNNLAMAVGPTLSLYIHDSFANFDYIFLLSMVSATIGLICVSTIRMPYRREPILEKPPVSLDRFLLLKGMPEALTLIFFSFSYGVLSTYLAVYGKEELGIDSGAGFFFVLLAVGLILSRLTSGRWLNRGYVTRNILVGMLLSLLGYLIFVAVRNEWGYYGAAVILGLGYGCICPAYQTMFINLAPNNQRGTANSTYLTAWDLGVGLGVLIGGQIAEVSNYATVYATACVLCAIGYVLFKMKTAAHFENHKLRMNKRSEFNDIDFILHKIWAKTILLLSDMKKREGIMMSKMVKKRDMNNKASFSKRISFLNARMTSTLSVSLVLFILGIMVLMGFLATNLSRHVKENIGFSIVLNESAGERQVHQLQRMLERSKYVKAAQYISKEDALKEVMIELGENPEDVLGVNPLQSSIEVKLKADYANTDSLAVIEKNLRGQVIVSDILYQKDLIQSVNDNMSRIGLVLLALAIVLMLISFALISNTIRLGAYSKRFLIHTMKLVGATPAFIRRPFIVSNVINGIVASVIAMLLLSGCIYYLMSEMENFTTLLSVPMMVLVFLSVLILGIILTAVSAYWAVNRYIRMDRDDLYYIMESKKMKSESVVPGEQKKTEFALGKTNIILIAVAFVVIVVGFLLMLGPGTTPEAYNPDIFSFRRIVLAPGIAFAGFVFMVYAIMRNSKMTWLESLILGLVQGLTEYLPVSSSGHLEIANALFGIQGEENLTFAVLVHTATVCSTIVVLWKEVEILFRGLFRFTWNSETKYLAKIALSMIPVGIVGLFLKDYVESFFGNGLLLVGIMLLVTAALLTFAYYARPRVKEDISYRDAFIIGLSQAVAVLPGLSRSGTTIATGLMLGNKKEQVARFSFLMVIIPILGEALLDLMKGGFSPAESGLSIPVMIIGFLAAFVSGCLACKWMLRLVNNGKLVYFAIYCVAMGACAIIYSLVHMDFNEGEIIYIDKPLHWTSFDVVKRIRLRILRRIKQKKLKVGHAGTLDPLATGVMIICTGRATKRIEEFQYQTKEYIATLRLGATTPSFDLETEIDGVYPHEHITRESVERTLPRFVGSIMQIPPSYSACKVDGRRAYDMARKGQAVDLKPKELVIDEIELLSCELPEIKIRVVCSKGTYIRALARDIGEALGSGAHLVGLIRTRVGDVTLADCLSVEQVADMIDHIDVEPVLEEEKKEMKLSQFKFKLPEEQIAQYPAKNRDESRLMVIDRKTGKIEHRIFKEIIEYFDEKDVFVFNDTKVFPARLYGNKEKTGAKIEVFLLRELNEENRLWDVLVEPARKIRIGNKLYFGDDDSMVAEVIDNTTSRGRTLRFLYDGSHDEFKEALYKLGEMPLPSYIARPVEEMDADRYQNIFARNEGAVVTPAAGLHFSRELLKRMEIKGIDYGFLTLHSGLGNFREIDVEDLTKHKMDSEQMRVTPELVELVNHAKDEGRKVCAVGTSVMRGIESAVSTGGHMKTYDGWTNKFIFPPYDFTVATNLVTNFHMPLSTMLMMVAAFGGYDIVLEAYESALKEGYRFGAYGDAMLILMACVNGLLQELQQRDCPGFSPDSLFIDCASQRQPNRNASVKVHKFFPRKQQIYTQKFPVLENFMDYACITITKRDGSKENFSIEKIERAIAKAYRADGMNDDETSIKQVTAEVAAAIDRENISVEEIQDLVERKLMMRNPSVAKKFIIYREWRTKEREKRTSMKQVMDGIVAVEKNDVNLSNANMSSHTPAGQMMTFASEVTKDYAYKYLVGVRYGRAHREGDIHIHDLDYYPTKTTTCVQYDLEDIFNRGFHTKNGTVRTPQSIQSYATLATIVFQTNQNEQHGGQSIPAFDHFMAPGVLKSFRKHLENGVGFICRLHGMEDMPALKDLFQEGVVSIDMTEEQKAALGERLKEIGVNVSVAELDTAWRQSYEMTRKDTHQAMEGLVHNLNTMHSRGGNQVVFSSINYGTDTSAEGRMVMRELLSATVEGLGSGEVPVFPIQIFKVKDGVSYTDEDYDAAMADFEGAMAGKIKFKAPNFDLLLEACRTTSTSLFPNFLFLDTEYNKNDLWKADDPDRFRYEVATMGCRTRVFENLHGIKSSWGRGNLSFTSMNMPRLAIEARREAEELHPDGDKHAIRREARILFLEKVRSVASMIAEQLYERYEYQRKALARQFPFMMGNDVWKGGGKLQPNDEVGDVIDSGTLGIGFIGGHNAMCAIYGEGHAHNQEAWNTLYDAIRVMNNVVEEYKTRYNLNYSVLATPAEGLSGRFTRMDRKRYGVIPGVTDRDYYVNSFHIDVKEPVGIVEKIKKEAPFHAITKGGHITYVELDGEAKKNVSVILKIVKVMHDEGIGYGSINHPVDTCRSCGYRGVIYTQCPVCKSENISRMRRITGYLTGSLESWNSAKQAEERDRVKHKMEPLHIINVYPETISDGFGVRYAIYLAGCTHHCRGCHNPGSWSPVAGEPLTELILSRIVAEINDNPILDGITISGGDPFYNPFALLALLRRLKEETHKNVWCYTGYTYESLLKDETRRPCLDYIDTLVDGPFVQSLFDPALSFRGSSNQRILHLSKYRMNVLTNLKCTLALSAGFCSSFANAQKQPHIILIMTDQQRGDAVGCMGNEFVITPHLDKLANEGTLFMNAYSSCPSSTPARAGLLTGMSPWHHGMLGYGRVAPKYEYEMPQMLKDAGYYTFGIGKMHWYPQRVKHGFDGTLLDESGRRQDPHFTSDYRQWFQVQAPGKNPDATGIWWNDHGAGVYKLDEKLHPTYWTGEMACNLISHYDPESRPLFLKVSFARPHSPYDPPQRFLDMYDNVDVPDPAIGDWCGRYAKRLNPEGAASDAPYGNFGNEYVRNSKRHYYANITFIDEQIGRIVQALKDKGMYDDALIFFVSDHGDMMGDHYHWRKTYPYEGSVHVPCIAKWPASVGGVAEKIDNPVELRDVLPTFLDIAGATVPADMDGCPLLPLAKGTDTGWREYIDLEHATCYSRDNYWCALTDGKIKYVWRFYTGQEELFDLVTDPQELHNAVNDKEYKGRLEKLRARMIRHLSERGEEFVKDGRLVVRKKKMLYSPHYPKEMEKITDAVMSEKPRYAILDGLRGVAAVIVVAFHLFETYSKGPAYQILNHGYLAVDFFFVLSGFVIGYAYDNRWGKMSTLAFFKRRLIRLHPMVIMGSAIGALLFYFGNCERFPLIDQTAWWQVLLMFLLACTMIPALTSWDIRGWQETNPLNGPTWSLMWEYLANILYALVVRRFSKTALVCFVSFAAFLTLDLTLNLDVFGLLAHRDITAYTVIGGWSITPEQVYIGIVRVLYPFFGGLLLFRIGKLIRVKAGFWWCSLLVVAALVMPRIGGETDAWQNGIYDAACILLLFPVIVAMGAGSEVKGKHSVAVCNYLGEISYPLYITHYPFAYMQMAWVTHNPDASMGAHVFVSVSTFILSVGVAHACLKLYDLPVRNWLKNRFLVNKMESKYYHLTGGTHSFLVLHDLLNPSEEFPIHTQSDWELIYIIRGCGTFVIGDQSQPFTKDEIFLIPPDMLHGWIFDNNPGNVVEDICLLFRKNLFKELSVTLPEIGPLGHLDSRQHSAFQLRGDLLKNVRHEMQEIIKTDSLGQLSGVIRILGHLALSDEMNPTGINRPLKKRDKKIQQIEIYVSLHYNHDIPIDEIASLVHMNRSSFCVFFKRMKGISFTNYLNTYRMDIACRLLSTTDKSVSEIAYGVGFNNLSHFCRTFLKYKEVSPTKYRNRMGHGHSDITTTPAMKKFLVMACIAAASMIALPAVAQTTTGSKTQTECCKKGKADCKKECNCTDCKCKDCKATAPCCDSKAKCNDKADCCKQAKCDKAKAPCCEKKNVKKMDEWLSRTRLLFGDEPIKRLQNAHVLVVGVGGVGAYAAEMVVRAGIGALTIIDGDTVSESNLNRQLVALHSTLGKPKVEVLKERFLDINPDLKLTAQHRFIEEEDIPALLEGGEIDFVIDAIDTLAPKVALIAYCLRHKIKIVSSMGAGGRKDPSAIRIADIADTYHCALAKAVRLRLRKEGISKGLKTVFSTEQADRNAIVVVEGERNKKSTVGTISYLPAIFGCYLAGHVIRKLTEVMIEIKNIHKSYGSLEVLKGIDAVIEQGEIVSIVGASGAGKTTLLQIVGTLDKPDCGEILYDGRRVDNLPDREMARFRNGNIGFVFQFHQLLPEFTALENVMIPALIGGKKQSDAEQEAKRILDFLSLSDRLGHKPAQLSGGEKQRVAVARALINRPSVILADEPSGSLDSKNKIELHKLFFDLRDEFKQTFVIVTHDETLARMTDRTLFMKDGSIVSPASVEEMKKSWLYGCSFILLSIFATACGDDEKDIYGIFYADIVTCHTNKGNPYFTYQTTDSAPVDTLYPVSEVNSDDMGEGVRVLLQYRPIETLSEHKKQVEIQALSAIHFDTLRIVPHDKIDQLPDDTLYLQSAWKTGDFLNLRYRIDYHSRPHSILLVADEAELSGDTLKVQLRHSRNDDPEGHWSNLYSSFNISAYRSRPYTTLQLYVNQVNFNYKYYYFKLNMEEKKEIQIELSAEVAEGIYSNLAIISHAPSEFVIDFIRMTPGAPKAPVKSRIILTAEHAKRLLFALQDNIRKYEAQFGPIQMNDPQRGGMPPFMAPGGEAMNITLQQWLSRQPYTQTTDSDRYYTQLANRVYDLVNISPLKERLTEEATKSLCCDVVGYFADILSGTGLWATFLSHHRSLYGRTLPFFPAENYYDGEVNREDLRVLLWYLLCTHDSLHEILSPLDDRLVATADTIYDLLESEYETAPDSPLLQEFCLPELNDTDDPESRYRFAEWLFWDSFLLGPSNRSLARQLSHEAQSKSHGDKERIAKLGELRRESLYTLPAGPLALFAHEWVSLLWQHTFPEEAEEKKELHPYYRQFTRETGGMPVKYIDSYSELDKFLTEGMQWGETEGGHLSHLAGKKNFILYVTPYKGMLIASDIAQCVCDPANPCYDPQVARRDALSLLTVPGRCPIDLLIYLCENRLLPDARFADGDSALVTENWDFIARCLLQDYYRAVMPQTTTTPSSYPSYVYTNENNRIGLSPAKGEKKTRFYKLSPMFRILILLVLGVGVGYMLRGRSFVGVTKWSIQITVCVLLFVFGVSIGSDRNLVDNFYNFGWQAAVIACLGVLGSIVAARVAQRLFFKKGGESMKGNLMILVCFLAGVFVGLGDFAPEWLLGHDLPIIILSLLIVQVGISLGSNNDLRGLFHSLNPRMSLLPVFTIGGTLLFSAIGVFLLHGRDLNDCLTIGSGFGYYSLSSVLIADIKSATLGPQGAAELATIALLANVIREMIALFGTPVLARWGGRLVPISVAGINSMDVCLPMIVRSSYKGEELIPIAILHGIALEVSVPFLINAFCMVEEPFVNLRTAIESTRQAVLLKYYNELLELDPKTQPKQITAVTRCVDTLERHSREQEEQQTDNDIDKMIAEGRLPGEYVQRYRWCKRAAYYFSSIVSAIDETDAYDLPEGEKHPYEEFASRFWEEVARRYWAAKDEVKKDMEEKRKQWKQGRLAKCSRRKKTGKSLRLPKVLPAPPTPPPPSPKGYFPHLPVSPQPATAWCMGMLYSSSAHECAIGEVSVRTEGLKTTSYQSVYTGHIPFSPAMSRSITGHSRGGGWKSFDNIVLLLFMPCPAALRGVFAAQNIGERQRSDSDEERGWKIACYILKAMIFNPSVTSCHLPYILLGKTPRKATGYGREEGKIPTKHRSGMWLPTKDLLLIFKSALMNFLLNPFVLFALHSTCTIFDKSPIMKIEQIISDAAVKAVKALYGIEAAPGTTVPQKTKKEFEGNLTLVVFPFLKASHKAPEATAQEIGEYLLANEPAVASFNVIKGFLNLVIAPSFWSQMLHHIDEEADFGTHKAAADAPLVMVEYSSPNTNKPLHLGHVRNNLLGYSLSEILKANGNRVVKTNIVNDRGIHICKSMLAWQKWGDGVTPEKAGKKGDHLIGDFYVLFDKHYKQELKELEAKGMTPEEAEAASPLMQEARAMLRKWEAGDPEVRSVWEMMNNWVYAGFDETYRRLGVDFDKIYYESQTYLEGKEKVLEGLEKGIMYRKEDGSVWADLTAEGLDHKLLLRSDGTSVYMTQDIGTAKLRFKDFPIDKMIYVVGNEQNYHFQVLSILLDKLGFKWGKDLVHFSYGMVELPEGKMKSREGTVVDADDLMDEMIATARETSAELGKLDGCTAEEAEEISRIVGLGALKYFILKVDPRKNMTFNPKESIDFNGNTGPFIQYTHARICSVMRKAAEAGIDYRQVDTAKVEPSEKEISLIQHLADFPAVVAEAGRIYSPSLIANYVYDLVKEYNQFYHDYSILREENAEVRAFRLMLSANVAKVIKTGMGLLGIEVPDRMMENLYDSSYKSTTGTSVLSMVMRKVYGRMFLALVVTALTSLYVASSPAILSVVLGNRAVFFGLMIAELAVVFVVSGMLNKLSTTTATLLFYLYAVLNGVVFSSIFVVYDLGSIAYTFFITAGVFGAMSVYGMVTKNDMTKFGSYCIMGLFGLIIASVVNIFVASSTLDWIISLFGVALFIGLTAWDTQKIKNAAYVTDPSQTGKLATIGALSLYLDFINLFLYLLRIFGGRSNDMTQPFYIYNTLTRKKEEFKPLNPPYVGMYVCGPTVYGDAHLGHARPAITFDVLFRYLRHLGYKVRYVRNITDVGHLENDADEGEDKVAKKARLESLEPMEVVQYYLNRYHKAMEALNVLPPSIEPHASGHIIEQIEYIKKIIEAGYAYVSNGSVYFDVVKYNKDHHYGKLSGRNIDDLLNTTRELDGQSEKHNSFDFALWKKASPEHIMRWPSPWSDGFPGWHLECSTMSTKYLGEEFDIHGGGMDLLFPHHECEIAQSVAAQGHETVHYWMHNNMITINGQKMGKSLGNFITLDEFFSGNHKLLQQPYSPMTIRFFILQAHYRSTVDFSNEALQASEKALQRMLEGWDNLSKIEPAEVSTVDVKTIRERCYEAMNDDLSTPIVISHLFEAVKIINTVLAGGATLSVEDSAHLKETFRIFLFDIMGIREEAGVSEEGNEAYHKAVDLLLDVRKEAKARKDWTTSDYIRDRLSEIGFEIKDTKEGVEWKLKMKSTLDFHPKFLASLASYSKEKFTKDLMAGIIVGIVALPLAIAFGIASGVSPEKGLITAIIGGFIVSFLGGNSVQIGGPTGAFIVIVYGIIQAYGLEGLAIATFMAGLILVLMGCFRLGTIIKFIPYPIVVGFTSGIALTIFATQIKDLLGLSMDSVPADFISKWVAYFQHIETTNFWSLGIGILSILIIAYTPRISNKIPGSLMAIILMTVLVYVLERLWGIEGIETIGDRFNISNEVPEPQALNINMETINQLLSPAFTIAVLGAIESLLSATVADGVTGDKTNSNTELIAQGAANIVVPFFGGIPVTGAIARTMTNINNGGRTPIAGIIHAIVLLLIFLFLMPLIKLVPMSCLAGVLIVVSYNMSGWRTVRSLLKNPKSDVSVLIITFLLTVIFNLTIAIEIGLLLAVVLFLRRMTETTQISVLHDELDIATGTESTTHEVLKVAKGVEVYEIEGPFFFGVATKFDELMRSMADRPLVRIIRMRKVPFIDSTAIHNLEILITSSQKEKIHVILSGVNPTVHATLKKANIDRLIGDDHICDHITKAVAKANEFVAEMKKMRNYFNSMKKIKFSLFFLLSVFGLCAQSPILVLEAENADSIHSPARVKSGDGFSNGKYVGGNDRGSYLFFHNVTMEKAGTYEFKTYFNCNGVRRFTVKVNNYPEVECTVNGTAKWDTPPAETAKVLIYLAAGTNTIKITPYPTTSGGPNLDKFEILETSESPLPVPQEGFPITLEAEYAHLYGALKVKNLEGMSNGRYVGDFNNKSNSYLQFTCVDIPEEGPYELKIFTNDPTGRPLDIQINNYAKTYINVNKSEGKWDQLPTAETSVLVWLDKGLNTISFTESCRYDGPNIDKIEIHETDQTMEKPDIEKPYPESCKEIDEYKISFMGSSVCYGTGATNDYGYAYIYTDLLKQRKQENIGKDWTTSNISIGGNTTQMVLDRWERDLLRDCGRYVFYGLSLGNERNNGTQTDQAAKNYEKGMKQLIRQADSVGIVPVMASNYANGGFNESDYEILKNLNLTIQQWEVPSVNMLGAVDDGAGRWVKAIESDGAHPNSDGHREMSYAIVPSLFDALDAGKTIPQRQESTAYALGKASATQHIEFVPENIVHPFTLSFEVKASSAGTLASFETENGTGNIKIDENGNIVYESPSDGQITSTTSANDEWLCISLTHYYAWGMTQLYVNGVKCGELSEKLVATKFALGGSNAPDKADYRQLFFWRSGMNDKEIAAVAEGKMLRSSLEIYAPLSNESPLINLAQSTNTLALVENTTSGIASLKGRCMLFSPNPVKQGERVNAGCSGIFEIYSVNGMLLDRQTLRNENETISTDALTAGTYVIHSNDTGKIGLLVIYMSITIQEISGTRGLKKFAKFPINLYKGNEYYVPALVLDEVGTLNSKNNPAFDFCESVYYMAYKDGEPVGRIAGIINHKANEKSGEKAGRFGFVDFIDDKEVSKALFNAVEKWAKSKGMTEIHGPLGFTDMDPEGTLVEGFDQLSTMSAIYNYPYYPQHIESMGYEKAIDWVEYKIKVPECVPEKHQRISDIVQRKYNLRILKFKSASDVYKGNYGQKIFDLINNAYADLYGYSTLSQRQIDYYVKMYIPLLRLENVTAIVDEQDDLIAVGIAIPSLSKALQKSRGRLFPFGFIHLLKALKGKNDGVDLLLVAVRPDYQSKGVNALLFSDLIPVFIQNGYKYAESNPELEMNEKVQSQWQYFERQQHKRRRAYTKKIMEVINFAEKNSVINRFMAELRDVNIQTDRIRFRRNLERIGEIMAYEISHRLHYSEKKVKTPLGTAHVNLPDDTVVLATILRAGLPFHQGFLSCLDDAENAFVSAYRKYKDKLNFDIFIEYIASPRIDGKVLVLTDPMLATGGSMELSYKALLTKGTPKDIHIASVIASRQAIDYVKDHFPENTTIWVGAIDDKLDEHSYIVPGLGDAGDLAYGIKEMATLDLSKYGIKDVKEILHNPSYEVLFEEETKAGLEGYERGQVTELGAVNVMTGIYTGRSPKDKFFVMNEASKDTIWWTTDEYKNDNKPCSEAAWADLKAKAVKELSGKRLFVMDTFCGANPATRLKVRFIMEVAWQAHFVKNMFIRPTDEELANYGEPDFVSFNAAKAKVDNYKELGLNSETATVFNLKTNEQVILNTWYGGEMKKGIFSIMNYLNPLKGMASMHCSANTDKEGKSTAIFFGLSGTGKTTLSTDPKRLLIGDDEHGWDNDGVFNYEGGCYAKVINLDKESEPDIYNAITRDALLENVTVDANGKIDFADKSVTENTRVSYPIYHIKNIVEPVSKGPHAKQVIFLSADAFGVLPPVSILNAEQTKYYFLSGFTAKLAGTERGITEPTPTFSACFGAAFLSLHPTKYAEELVKKMEMVGAKAYLVNTGWNGTGKRISIRDTRGIIDAILDGSIDKAPTKVIPYFDFVVPTELPGVDKNILDPRDTYANAADWEVKAKDLAARFIKNFSKFEGNAAGKALVAAGPKLMKLKIYLSLLLFSFLSGMVSQGAEHPKREFRGAWIHTVGQSRYMEMNRDAMQDYFDQMLDSLQYIGINAVIFQVRPTADAFYRSELEPWSKYLTGKQGVAPEPLWDPLQYMIEQCHARNMELHAWLNPYRVGTNADEPLAASHIYHKHPEWFVRYGRQLYFDPGLPECRRFIGRVVDDIVSRYDVDAIHMDDYFYPYPIAGSEFPDENSYARYGNGMDRGDWRRENVNALIKELHEIIKSRKPWVRFGISPFGIYRNQKSDPDGSATNGLQNYDQLYADVLLWTRNGWVDYMLPQLYWEIGHQAACVETLIYWWNNHANGRHLYIGQDVARTMNATDVNPIYTQLNHKMQLSRYLDHVGGNCFWPGYSLLENYKGIADDLKGYYHAVPSLIPAYTFIDSKAPDEVKGLKAKWTPEGYELQWKRKKTDDEMQKQIYFCVYRFAPSEDICLCDASHLVAITRDTKFLLPYKHGTRQYVYVVTAVDRMHNESKGKIKKVKLMDIIWIIVGAICLLVGLAGCFLPALPGPPLSYVGMILLHLTDKVQFTATQLIVWAILVIIVQVLDYLTPLIGTKYSGGSKWGNRGCIAGTVIGIFLFPPWGIIFGPLVGAVIGELLGGKLTHEALKAGLGAFVGFLLGVILKVSLCGYFVVVFISALFMKRLFACALLSLLLSSCYNARVCVGNVQKNDPVVKVNSVMNHHLLYGLIPVGNTKMEAKEYVGDAENYVIKNSWTFLDGFLNILTWGIYTPTTTTFYVPVNEMGKMGKRVYLGLGSNLGNKERIVRKAIDKIGERVGAVVAVSSFYKTAPWGYQSVHTFCNAAIAVDTDLSPEEVLFTVQEIERELGSKKHREGDGSYVDRLIDIDLLDYDGLVLDTHSLVLPHPYMHKRTFVMTPLAEIAPQWVHPVLGKTATELLEGLRNEKMLWTCTIFVAENVEGFGCLQPRKKMLKLRYGAFRSPSGFIKSPLFSWELRSFFLQMNYLFTSESVSEGHPDKVADQISDALLDEFLAYDPNSKVACETLVTTGQVVLAGEVKSNAYVDLMEVARRVIHRIGYNKSSYKFDADSCGIFSAIHEQSADINRGVERAEAMSQGAGDQGMMFGYACNETDNYMPLSLDLSHLLLTELAVIRREASAMTYLRKGKVTSYLRPDSKSQVTIEYNERNEPVRVHTIVLSTQHDEFVTPADDSKEAQEAADREMLQTIYNDVKQVLLPRVIAQLPERVRTLFDDQLILLVNPTGKFVIGGPHGDTGLTGRKIIVDTYGGKGGHGGGAFSGKDPSKVDRSAAYAARHIAKNLVAAGVSDEILVQVSYAIGVAEPVSVYVNTYGKSHVSMSDAEIARRVCEIFDMRPKAIEERLKLRNPIYEETAAYGHMGRKPQTVVKTFKSHYNPEPIVREVELFTWEKLDYVEVVKKAFGMAMNYIDIDSSQHELYDSWRKLYTVSFPIFEQRTQEQQEKAFSCADYHLVGYSEGDMFVGFISYWEFSSYRYIEHFAVHQGLRGRGYGSEILNAFLRSTSKIVLLEIDPVVDSVSRARLRFYRKCGFHENPFAHTHPPYREGYPPHSLVVLTSPRSITENEYRIFSTDLTEVVMQQGMNKFIFHFSHHLLYLYMKRLFILLLIVLLCIPGFTQIRNDVPRYNPDSVRKELDKRPYFSLYKDNYFIGGTTIGSKPTNKNSDVKFQLSISQRLTKSKLPFDTYLFITYTQKAFWNVFQESLPMYDLNFNPGIGLSHLVIHRNRLIGQVSLLIEHESNGKDSIWSRSWNKISFMGALAVDRNVELQFKTWIPIIDSGNNRDILKYCGIFQLAGSYISDNRRFGATVILTKRSGWNFNFNTVIELNARLFPNENQYFFIQYYNGYGEGLLDYNKFHSRLRVGFVIKPQNFSNYMLYRLYFIGKKVVLFRRFFHCCRVLYFVLPGYCFAPPVKSSTFARNENVFCMNKIGAVLCICVLLLSGCGGKDNEFVVEGTINNLGGRPIYAVYSLENGIVVDTLRPQNGFITFKNSASELIPIQFYYFDKTSLTKIYVQNGDRIELSGDGQDPFGLRVKGSSLNKDLFKFNQENKELLQSWSAERNISASGMRTRRYEQLSKELQGVVAKYVGEHKDSPVSAILLDDYVLGRVSDAFCDSLIGLLDDRVLSAPPATALEMYRQFETIQKSDTVLPYLSLTTVADTTELLNPREAQATLLCFWAAETPGTQRYSGFLREIAERYDSLVRVVEISLDRDSAVWKERIEADSAVWARRWAKGGYLYPGVKELHIQSIPYLLVADSLGRIVARGLSPDSSRVYIERLVTPMLVKVFGAAVQGIDALVVTIEVNCSQGIRFFMVGLPDAAVKESHERIVSAVEHNGYRFPRKQVIVNMSPADIRKEGAAYDLPLAVGILASDEKIETGKLSEYMLMGELSLDGSILPIKGALPIAIKAREEGFKGLIIPKANVREAAVVNHLDVYGVENITEVIRFLNGEIELEPTVIDTRAEFFKEYTHFDLDFSDVKGQESVKRAFEVAAAGGHNIILIGPPGAGKSMMAKRLPSILPPLTLQEALETTKIHSVAGRMERGSSLLSQRPFRSPHHTISSVALVGGGAFPQPGEISLAHNGVLFLDELPEFSRQVLEVMRQPLEDRKITIARAKYSIEYPAGVMLVASMNPCPCGYYNHPEKECICSPGTIQRYLGKISGPLLDRIDIQVEIVPVPFEKISDTRPAESSESIRQRVIAAREIQAARFADYPGIYCNAQMTTRLLNRFAVPDEAGLKRLKDAMNRFHLSARAYDRILKVARTIADLEGSEGVQVQHINEAVNYRNLDRENWGDRMKNITVFLASSDELKNDRNSFHSLVASLDEIFEPRGYRIRCRRWEDFSAFCTGTRTQDDYNRIVRASDICICMFHRKAGEYTIEEFNQALDEYVKNQSHPKTFVYIRALIEGEMEDEALKRFKEDLFDRVGHYWCNYATDDAMKLHFVMQLERIIPSVSGNASVTEGNHFKIENGVVSLYGHKIAELDNLSFAAENPEYLSLKESIARLNTEIARLRATGVAELQPIIDEKQAELYKKRESLNRLESQLFDLALSINKLIGSGTPVSERKRLAIEMFERGNSKGVVEILNEKDIAADAAQARKEIEQGKLLVDSGRSLIEAGLQKTRSLAEEYVLRAKALMTDYAEPRRFELACHAYEQGIELIRANLSEEELAKSLFEYGHFLQTNKRYDLAEARYRENLDIYQRLEVISPQAYEPGLATTQNNLGLLYSDTQCYGESEEMYLSAVEIYQRLSVVNPQVYEPYLATTQNNLGLLYRDTQRYGESEEMYLSAVEIYQRLSVVNPQVYEPDLARAQNNLGLLYSDTQRYGESEEMYLSAMEIFRELTVANPQAYEPDLARTRNNLGNLYRDTQRYGESEEMYLSAVEIYQRLSVANPQVYEPDLARTRNNLGCLYDNTQRYKESEEMYLSVLTVYQRLTIANPQVYELDLARTQNNLGNLYRDTRRYEDSEKMYLSAVEIYQRLSVANPQVYEPDLAMTQNNLGNLYRDTQRYKESEEMYLSVLTVYQRLTIANLQVYEPDLARAQNNLGNLYRDTQRYKESEEMYLSAVEIYQRLSVANPQVYEPDLAMVQNNLGLLYSDIQRYEDSEKMHLSAVEIYRRLAAANPQVYEPDLAETQNDLGILYSDTRRYEESEEMYLSAMEIRRRLAVANPQVYEPGLARTQYNLGCLYSDTRRYEESEKMYLSAMEIRRRLAVANPQVYEPDLADTQYNLGCLYYNIQRYEESGEMYLSALKVYQRLTVADPQVYEPYLVRACNNLSFLFLAQGNFEEAERYAREGAKYDSTHHTIYTNLAASLLFQGRYAEAEEIYLRYKEELKEDFLSDFEDFYQRGIIPPEREDDVERIKKLLSKMETKKNTRLLSLDTLRGFDMLFIMGFAPLVVALNALHPTAVGDVIAGHMRHVPWDGFTQHDMIFPLFLFIAGISFPFSLAKQRGSGSSDKHIYLRVLRRGVTLVLLGFLYNGFLQLNFPDVRLASVLGRIGLAWMFGAFIYMSLKKSVQYGLIVFILVGYWLLLAFVPAPDAAGASPLSIEGNLVGYIDRHCLPGKLIYGNFDPEGLLSTLPAIVTALLGIYAGEIVRSTRLGSGERKSLLLSGIGVVLVAIGLVWNTVFPINKMLWSSSFTCFVGGLSFLLFALFYYIVDVKGWKSWTLFFRVIGLNSITIYLAQQVVGFSHMNKFLFGGISQWVGECAGEPAGAVVLRAGYVACCWFFLYFLYRKNIFLKVMAKEIVETPLMKQYIEMKAKHPDAILLFRVGDFYETFSDDALVASEILGITLTRRANGAAQYVELAGFPHHALDTYLPKLVRAGKRVAICEQLEDPKLTKKLVKRGITELVTPGVSINDNILDHRENNFLAGVHFGKGNKVGVAFLDISTGEFLTAEGDFDYVDKLLGNFSPKEVLFERTKRKLFEEHFGSRFFTFELDDWVYTEDAASDRLLRHFETKNLKGFGIHNMPNAIIAAGSLLHYLDITQHTQISHITSLSRIEEERYVRLDKFTVRSLELLSPMNEGGKSLLDVIDRTVTPMGARMLKRWVVFPLKDVKPIEDRLNGVEFFFRHPEVREVIDPQLDTIGDMERLISKVAVGRISPREVVQLKVALSAIEPIKAVCEQSDEPVLQRIGEQLNCCTIIRDRIEHEINPDAPNLVNRGGIIRKGVNDELDELREISYSGKDYLLHVQQRESEKTGIPSLKIGYNNVFGYYIEVRNTHKDKVPSDWIRKQTLVSAERYITQELKEYEEKILGAEEKILSLETQLFNDLILALTEYIPAIQLDSNLIARLDCLLSFVKSAVENRYIRPEVNDSLVIDIKEGRHPVIEKQLPPGEPYISNSVELDNDKQQIMMITGPNMAGKSALLRQTALIVLMAQIGSFVPAEAAKIGIVDKIFTRVGASDNISLGESTFMVEMTEAADILNNLSERSLVLFDELGRGTSTYDGISIAWAIVEHIHEHPKARAKTLFATHYHELNEMERTYKRIVNYNVSVKEVDNKVIFLRKLVRGGSEHSFGIHVAKLAGMPQSIVKRANQILKQLESENRQNGIAKPTAEIASSRGGMQLSFFQLDDPVLSQVRDEILQVDINNLTPVEALNKLNEIRKIITGKMMKRSDFEIMAPVGSYDSLTAAIQGGADSVYFGIEGLNMRARSSNNFTIDDLHEIVRICNEHHIKSYLTVNTVIYDEDIPLLHRIIDAAKEAGLSAIIASDVAAMTYAREIGVEVHLSTQLNISNTEALRFYARFADVVVLARELNMEQVTRIHEAILRDRIVGPGGEPVRIEMFCHGALCMAVSGKCYLSLHEMNASANRGACMQICRRSYEVKDKETGNELEVDNAYIMSPKDLKTIHFLNKLIDSGVRVFKIEGRARGPEYVRTVVSCYNEAIESYLNDDFTDEKIALWDERLATVFNRGFWNGYYLGQRLGEWTHNYGSGATKRKIYIGKGVKYFSNLGVAEFLMESGSLSVGDEILVTGPTTGALIRKVEEIRVDLKPVQKTVKGERFSMRIDEKIRPSDKLFKWVDSSELNTKMFMKRAIVILCGIVCTGQLLAAKPGIPAYNDDRALIDRGIFLFQEKNYAGCADVMKEACEGDLSPEQRETADWYIALSEARNYSPQAVRRLTDFLRNYPDSKHTLQARLALADYYYDSQDYAKALKTYQTVNVSLLTGDEEDRWGYRTACSLLKTGNPDAAKPLFQLLIGKERFRTGATFYLSYIQMNEGDDRAALSGFSKVADDRSFGYAARLHMLQIYFGQKRFAQVLSEGKALLSRPSSDADLYTELLRLLGESAYQEGDDKAATEYLERYLQRCRKPERSSLYVMGVMAYRRGEDSEAIDYLGRVTGVDDALSQNAYLYIGQAYLRAGDKNNARMAFEMASQGNYDRQVRETALYNYALCLYDRTASPFDNSVGVFERFLNEFPGSRYADKINDYLVEVYMTTRNYRSALASIDKIRKPDGKILAAKQRILFQLGTEAFTNARIADAESLFSRAIAVGNYDTDIRGKAAFWLAECQYRREQYDIAARNYSAYLSSSKDKRSEMYSLAWYDWAYCQFKQHNFSQALDGFSRYVSVQTGGNRSMLADAYSRIGDCYYYARRFADAEQYYARAQETDVANGDYALFQKAFMAGLQRNHERKIELLDKLIVDYPRSGYLANAWFEKGQAYTILNRNNDAIVCYKQLIADYPQSAIARKGGLQLGMVYFNNGQTDKSVAAYQQVIERYPTSEEARIAVADLKSVYVEKDAVDAYANYLNSVGRSEQAPVSELDSLSYMAAERTYMTGKGIASLEKYVRNYPSGAFLIPANYYIGKVSFAAKDYDKALPAFDYVVTNSPDGEFAEEALARKCEILYLKARYDEAFAGFKELEKKATVGENKQAARLGMLRIARNKRQYGEVVTVADKLLSESKLSPDLRQEILFARADAYFHTGKGENAADDWRELSKDTRSIYGAQSAYLLAQYQFDNKAIDTAEKTLNTFIDKGTPHNYWLARAFLLMADIYEKRGETFQARQYLQSLRNNYPASDDDIISRIDKKLSKLGQTEMKRFSFLIISVFPFFLSAQVRSDSLRREVTIEKDFTPIVRDASKINTLPEVEAPTVTKQSIRYSDWTVPAPLEPCAVLLAPGGFGEKTEENQSRGYVDFGIGNYLNMVGNAGYRILQNDKDKLGVWLQHRSTCGTVDYNQSLTEDYPDSKKMHRLEERVVANYLHSFGKLDLGISGGYRYDSFNYYGLRYSGLTGISSPNQEINRFFLKSHIASTAGESDLLYKVSLAYYRYGYHRGYLQGEKGAAENLVNADFTLSAPIDRRSSISLDGSFDYVGYSRLQSAANYGMISLNPRYDWRNEHVAFAMGVKADVSFNNGTILRFSPDVRFDWTIVPDVQFYTAFTGGKKLNTWRSVSAYTLYFNPSTQVDNTYVPLDASLGIRINALPGFSVGLSGGYEICKKALFLLPEDLNGEFTGVSRFWGIDANALKAELDVSYRYGTKLEASAKVGYHRWKTADGGETISYNRPQWEGGVNIRYMPVRPFTLEAGYEFAAGREYSNLGKLSDIHLVHLKASYAFTSWFSLYGLTDNVLNRKYDILYGMPAQGINFMFGVDLKFMAKNLVIVESPAKAKTIEKFLGKDFEVLSSYGHIRDLKKKDFSVDIEHNYKPIYEIPADKKKLVETLKQEADKADMVWLASDEDREGEAIAWHLFEVLKLKPEKTKRIVFHEITKDAILHAIENPRDIDLNRVDAQQARRVLDRIVGFELSPVLWKKVKPALSAGRVQSVAVRLIVEREREISAFKPEAAYRVIGEFLLPGGELLKAELSQRLKTEDEAKALLEACKTAQFSIGDVTVKPAKKSPAAPFTTSTLQQEAARKLGFSVAQTMMVAQRLYEAGHITYMRTDSVNLSSLAINTTKDEIVKTLGERYLHIRNYHTHTKGAQEAHEAIRPTYISHHEINASSQEKRLYELIWKRTIASQMSDAELEKTTATIAVSGRKEHFVAVGEVLKFDGFLKVYMESTDDEGDTEGNDKMLPALAKGDVLTLSSVTATERFSQAPARYTEASLVRKLEELGIGRPSTYAPTISTIQQREYVEKGDRKGTERKYRMLTLHDGKIESGEKTELTGADKGKLLPTDIGVVVNDFLTEYFPDILNYNFTANVEQQFDDIAEGKTVWNDEIDHFYKLFHPVVESALALRLEHKVGERVLGTDPKSGRPVSVKIGRFGPLVQIGTPEDTEKPLFASLLKGQSMSTITLEEALKLFDLPRTLGDFEGKTVVVGIGRFGPYIRHDGKYVSLPKEFTPQGVSLEDAIMLIQQKREQESQRFIKKFDEDDELELLNGRFGPYIAYKKKNYKLPKGSEPASLTFADCMKIVEDADKAPAKKKPARKKTTKMIPKVIPIPQFHQSPNHYSKIFSRFRDLFSLTTVQQTNHAHQGPLYFTLQNAIKESSENIEYIEAVLNLFRDRLRPMLKQIGVRDMQSIAGYMAKELFNRYVWLIDTLQRYGRLTRREIDGLWQRSEYSDGKPMARRTFMNYRQAIQEMFDVNIECDASTYEYYIEDPDALQGNGARVWALNTLAVSNMLNESQELRNRIVLENIPSGQKFLRIVFEAMKENRVLILSYRSFRRVTSSHTLAAPYFVKLFRQRWYVIAKDFTDRKIKTYALDRVASLELSSRTFVYPDSFSPIDYFRDCFGITHDDMPAQEVVLRVPALQANYLRTLPLHESQEELDRNEHGSTFHYRLKITPDFEQEVYALGYWQAEVLSPQTLRDAVAERLSRSLACYGTAGLSCHEHRTMQPLFVALLPDKGGENLVLFFIFQPPRPLGTPPSHLRMLRHRYMKNTGSLRRITFGILFWSMANGIYAQTTPGMQPEWLSYDVIYQLGFLWKRAATATLQLTEYPDKYTSVLKARTLPFADNIFKVRDTLVSDMQRNKELLPIYYAKLADENGTYRKDEVNYTYDGNSTTGNIRLYRPKRNAIEDYTLTEPGIVYDMLSIFYVIRTFDFRAMEMYQIYNTKIFSGKNLEYLEIEYLGQEILKQNKKEYSTYKLHFRFYDRTGKKTSDKISAWISTDNKRIPLKVEGKLPLGSMKAVYTGEMNPKHPLSTITVYRLVASFILAISIYSCANMSRPGGGPRDETPPVFIKSTPVPNALNVSKQKVEIEFDEIIQVDKPSEKVIVSPPQKDMPEIRTSGRKITVILKDSLLPNTTYTIDFSDAIIDNNERNPLYGFAYSFSTGPKIDSLQVSGILLNARDLEPITGMLVGLHSDLEDSAFQKLPLERIASSDELGHFTIRNVTPGKYRLFALKDMNRDYRFDNPSEDIAFLDSIVIPSADVKLHVDTIWKDSVTIDTIIEYNHTHFYPNDILLTAFNEGFQSQYLDKSERKDRRKIDLYFKAPADSLPKLKPLNFEQEDWAILERSFHNDTLQYWIKDSLIYNMDTLLFTAEYLRTDTLRQLSLYNDTLKFIMKKVKAPKKKEKKKDKDNDSIEVPEIQFMQMNAKISSSLDVYKPLRFSFAEPLQTYDAGKIHLEQKRDTLWIPVADSLYTFLQDSIAIRDYTLTYKWTPGESYRIVMDSTAFTNIYGLFTNTYKQEFKVKALEDYANLYLSISGVSDSAFVEILDSGDKPVRTAPVINGGAEFMYMNPGTYYARLFIDRNGNGKYDTGNYSEKRQPEEVSYYPQELELKANWDIEQDWDIYATPVDKQKPDKIKKNKPKEKKRNYMLNYTNKIERETQERSSNIELLRILSMFLVLMIHYIPSRTLPTHDTLAHDTLGTLFDLELRSISFVCVNCFILISGYFGIRWKLKSFSNLLFQILFWAIVCPVIVSAATDSFNATDLFKTLYHNTFSRWFIEAYIGLYILAPMINRFIEKSTHRELGIFILAFYLFSTLFGYLGKAYDFNKGMSIISLVGLYLIGAYLRRKQDGIFDLSKYVYLGVYLVTGFIMVAIAALILKAGFSITPYSYLNPLIVLESIALFLFFKKLNIGSIKWINYIAVSSFAVYLIHNDLSIKPLYCAACDYIEAHYTPSFPYALLFMVGVFIVSVMADKVRLFIYKHTLLKLLKMQNKGFIRVVAVLLTLICLFYLSFSVVTAIYNNKAKEYAAGDEAKYKHYIDSISTEKVYWWYYTYQQCREMEIGLGLDLKGGMNVTLQISVADVLKSLSNNNPDPNFNAAIAAAQAAQAGNNDFIVSFYNEYKKIDPNVRLSAIFSTFQLKDKITPRSTNDEVISILRNELNSAVDNSYNVLRTRIDRFGVVAPNIQKLEKDGLILVELPGIKEPERVRKLLQGSANLEFWETYKLEQLAPKLDAVNNAIAAANAAQEPAEEEAPVVAEATPDTAAVAADSTASSLKKKLQQEASEAETMERIRKQNPLLSLMNYTQSYGGSPVIGIVNKNDTAAVNAMLASKIARDILPSDLILRWTVKAIDEKETLYQLIALKAGKGGKAPLGGDVIIDARDDFDKIQGSVVSMTMNAEGAKVWEKLTRDNIGNAIAIVLDNQVYSFPNVNGAISGGSSQITGGFSPEEAKDLANVLKSGKMAAAVTIVQEDVIGPSLGQEAIQNGLISFLVALVLLMAYLIIMYGWTPGLIASFGVICNLFFTMGILASLQAVLTLSGIAGIVLSLAMAVDANVLIFERTKEELRSGKSMKSAVADGYKNAFSAIFDSNLTSMITGVILLIYGTGPILGFATTLIIGIATSFFTAIFITRLIFEAGLNHGRFNNMTFTTSISRNFLTDTHINFVGLRKTGYICILAIVAVFVISFLTRGMNQGVDFSGGRNFVVRFEQPVSPLEIENMLEPSFEGSSLSVITITTDNQVRISTNYRIEDTGEGVDKEIEKKLYDGMQSLLGGVSLEEFSDNMIQSRQKVGPTIADDIKVGAYWAVFFSLIAMALYILLRFRNIAFSVGTLASVAFTTFSVVGLYSLLYGVLPFSMEIDQNFVAAVLTVIGYSVNDTVVIFDRIREEKTLYPKRDLITSINSALNSTLPRTINTGQSTIIVLLCILLLGAESVRSFAFAMLFGVIIGTFSTLFVATPIAYEIQRRGIAKKAAKEATAKMDKYNALYLYNICCEAQFSHSRYNHCSRINKINAPNQYRPLDKTTIFVEKFTGRMLEKTLGIVLHIIPYNDKISVAHLYTEQYGRSSYLIPQGGGKKARMFRSLFMPFSILELDIDYRNSRELQKIIEARTVLPLQNIYSDPVKNAEALFLSEVLCQTIKEPEPNLPLFAFIARSIQVLNIMEEGKANFHLCFLLQLCSFLGFSPNMETYRTGYSFDMLNGIFSPSRPIHTYTLDAREAEVFARLTRMDFNNLRHFKFNRGERNAILDRILTYYRLHQPDISELRSPEILRAIFDMEQLDVFDCSNVLIASYFADDRECAHENREHTLIYQCSGRLEIEERGKKTVLYPGDCAFMRRDNRMWLQKRVGKGEPYRSIVLKFSKAFLREFYQTLDRQQIPIDSKREKASLLLLPKNRPDIRSLFESVIPYFDAGEKPSEKILKLKMIEGVYVLLNTDRNLYASLFDFVEPWKIDILDYLNENYMCDLSMKEIASYTGRSLATFKRDFAKVSDLTPQKWIIRRRLEAAHDLIRSGKKKVTEACFDVGFKNLSHFSKVYKETYGVAPSWQSELYGKMTKSQEKVRQTAGHDALGEFAPEFAHLNDDILFGEVWSRSDLLSLRDRSIVTVVALMSQGLTDSSFKYHLESAKKNGVTKTEIAEILTHAAFYAGWPKAWAAFRMAKEVWVDCADSTAACSLDAYAQSIIFPVGKPNDAYAKYFIGQSYLAPVVTEGIPISNVTFEPGCRNNWHIHKATKGGGQILVCVGGRGYYQEWGKEPVELLPGDAVYISAGVKHWHGAAPDSWFSHLAIEAPGENKSNEWLEPVSEDEYSGVGRHQRMKQIVLILMSILSFSCSSQTQRQATDTTEPVSKKILVAYFSCTGTTGRVAESIAGAVDGRLYRITPAEAYTSADLDWNDKSSRSSVEMADEDSRPELGGEPLDMKDYDIVFLGYPIWWDLCPRPVNTFLEKYDFSGKTVIPFATSGGSSIAHSVKQLRKLYPNVTWNDGKLLNGGVAVATEWAKQVVENAKKVSRMNAHTIFERDLNGEMVSPSDPGYDELINAIWDTMKMATELNTSYHTPDEVRRILSVILGCEVDESITLLPPFYVDYGKHIKIGKGCFIQQCCTFFGRGGITLGENVFLGPKVNIITINHDPDPKNRDATYGRPVVLEDRVWVGINATILPGVRIGYGAIVGANSVVTKDVPPMTVVASNPARIIKELKKMKEINKMEIGRRGFLKTAMLAGAALTMPAGLNRAGRMANHKSSEKRIRQTQVRNLRNRYYAKTARNAVRKLRATTVKEEAAALYVKVSSMLDKLAKKNVIHKNKAANLKSKLALHVNKLMLMNERVWKDFISFFAVKVTPFAMSILSLYFLASSSPNKGDVFGSEVFVCINPFALRALPLYFAAQNTGGEGEVYIPFSSAVSRSITRYFCFLYRRYLKLLLCVAPAIGEVSRREGGGENDISSVCLFSSPVVSHNGIGGVSDGREGMDLLFSFPFLLLIDAIFQVHSVYDLYLFVNKVLAVRWVFVFILMFEFAVWIHNVWSGLMSEETENKSYSADSIQVLEGLEAVRKRPAMYIGDIGVKGLHHLVYEVVDNSIDEALAGYATHIEVYINEDNSIRVVDNGRGIPVDMHEKEHKSALEVVLTVLHAGGKFDKGSYKVSGGLHGVGVSCVNALSTYLRAEIRRNGKIYMQEYSCGKPLHDVEVIGETEETGTTIIFRPDNSIFSVTVYDYNILANRLRDLAYLNAGITLSLTDKRTTNDAGEYRKEVFYSKEGLKEFVRYIDSNKEHLIDDVIHIATERQGVPVEVAMTYNTTYNENVYSYVNNINTIEGGTHLTGFRRGLTRTLKKYAEDSKMLEKVKVEISSDDFREGLTAVISVKVMEPQFEGQTKTKLGNSEVIGAVDTAVSEALANYLEEHPAQAKAIVEKVIIAATARHAARKAREMVQRKSPLSGGGLPGKLADCSSRNPEDCEIFLVEGDSAGGSAKQGRDRMFQAILPLRGKILNVEKAMDHKVFESQEISNMFKALGVTIGTEEDSKEANIEKLRYHKIIIMTDADVDGAHIATLLLTFFFRRMRPLLEQGYVYLATPPLYKCKSKRGKAEEYCWTDQQKDQFCLKYCEGNEQLMETQRYKGLGEMNPHQLWETTMDPENRILKQVTIDNAAEADRVFSMLMGEDVGPRREFIESNATYANIDAMERKALNSLGYMELAAFFVFGTFLLGLYYDIVWLQWVTAILFILPMAGVLRYPSRCKERQEPFVKARFAWSLITMFLYLGMGFGLLTILMTALLDLREHLPITNPTWIFFLVLCIILFAPVLLNKLKIPHLIGMILAGILIGEHGFDILARDSSFELFGQVGLYYIMFLAGLEMNMEDFPAIRGKAIVFGILAFIIPIVLGFFSNILILKYGIVSSILLASMYASHTLISYPIVTRYGVSRHRCVSIAVGATAITDSLTLLVLAIVGSMYRTDSVGSWSWLELILKVSLMGLFIIYSFPRIGRWFLRKYEDGIVQFIFILAMVFLAAGLMELVGMEGILGAFFAGLVLNRLIPPVSPLRNYLEFVGNALFIPYFLIGVGMLIDVRVFFGHIESMKVAAVMTLMALSTKWIAAWTTQKIYGMKKIERQLMFGLSNAQAAATLAAVLVGYNIVLPDGSRLLNDDVLNGTIVLILITCIISSITTDIAARKMALSELPPDDTQSGTDNEKILISFSNQKNVKNLIYLALLVSNPKKIHGLVGLHVMYDNCSEADREQGKKLLLQAQEVAAKADVTLQTQNRLATNLSNGILHASKENDASEIIVGLHIRATQDESFFGPVLLNLLNKMDRQIMILHAVTPINRVHNIHVAIPENAEYEAGFYRWTERIARMGENTGRRIFYHGHAKTLSLIQAYLQRYHTSVLYEMQETDGGNELKRLSTELQLDDLMVIIMARHGSVSFRPSLEHVPHQINAYYTDKNFILLFPDSYAPASPELTFVELHGTRGTYEKKKGWLDFLWKKEEQNMPASGITVTQVDTKIPKITKMKKIQSVFIILLTVFHLSAQMNQGKYVPFHFSFIPPLSSNGINASQYTNGASFSILAGMSANERNFTFASISNVIANEARGLQFAGISNYIGKQGQGVAFAGMTNITKGTYKGVQFAGLLNTSKDITGLQFAGLLNIAGKVRGVQFAGLLNIAEESDCPIGLVNIVKRGEMGIALTYDILGNGIVSFRSGGKYTYGIIGFGYNHKLPSDNKTVAEAGYGVHIPCYSWFQINNEFKVTSTATSDKPFLNASYSLLPSFKIKKHYNIFGGASLNYSTTTEMDNQTLFPQNNLWKKHTDNRLQQLFIGYLVGIQYIFMKQGKRKGSKRIKKEDMLASVVEFFNQDRKRAFNYKQVAHGVGATTTPQKQMVFQLLEGMAEQNFLIEVSPGKYKANSRGTEVIGRFERRVNGKNHVITDDDESIFIAERNAMHAMDGDRVRVLVYAKRRGHDAEGEVVEIVEKTPQIFVGTLEVQKHFAFLLTDNKVLANDIFIPKTALKGGKTGDKAVVRITEWPDRARNPYGEVVDILGPAGENNTEIHAILAEFGLPYRYPEAVEKAANKIPDAITDEEIAAREDFRQVTTFTIDPKDAKDFDDALSIRRLSNGNWEVGVHIADVSYYVKPGSIIDKEAESRGTSVYLVDRVVPMLPERLCNEICSLRPDEDKLTFSCVFELNGNAEVQKSHIARTVIRSNRRFAYEEAQEVIETGEGDYKEEILALNDLAQKLRKRRFDNGSINFDRHEVKFDIDESGKPIGVYFKVSKEANKLIEEFMLLANRTVAEFIGKPRDGKKPKAFVYRVHDLPDPDKMASFAAFITRFGYKIKTEGSKADLSKGINSLLANVQGKPEENLVETIAIRAMAKAVYTTVNIGHYGLSFDYYTHFTSPIRRYPDLMVHRLLERYMAGGRSVNVQSLEDECKHASDMEQLAANAERASIKYKQVEFMGERLGEEYDGVISGITEWGLYVEINENKCEGLVPIRDLEDDYYEFDEKNYCLMGRRKHRIYRLGDPIRIKVARANLERKQLDFALVEMEENTNINSEFEYGSDAIKTLDWKEHIRRRPGMYIGKLGDGSHADDGIYVLLKEVLDNALDEHMMGFGKQIVVEISSEVVSVRDYGRGIPLDKVKDVSSKMNTGGKYDSKAFKKSVGLNGVGIKAVNALSSSFFIQSYRDGMSNSVSYACGEVVSESGLTPTDEPNGTLVQFSPDGTIFKNYAYREELIEPLLKNYVFLNTGLTILLNGRKFHSRNGLVDLLNEYMTTEPLYPIIHLSGADIEVVITHSNQYGEEYYSFVNGQHTTQGGTHLTAFREAATRTIKEFYAKNFEYTDIRNGMVAAISIKVEEPVFESQTKTKLGSKDVGPDGPTIAKFIGDFLKKELDNYLHKNGEVADVMLKKILASEKERKAIAGVTKLARERAKKANLNNRKLRDCRIHYNDTKGDRQDESCIFITEGDSASGSITKIRNVETQAVFSLRGKPLNTYGLTQKVVYENEEFNLLQAALNIEDGIEGLRYNKVIIATDADVDGMHIRLLMITFLLQFFPDLIKKGHVYILQTPLFRVRNKKETHYCYTDEERLAAIKKCGANPEVTRFKGLGEISPDEFRQFIGPDMRLDRVSLRKEDLVKDLLEFYMGKNTMERQNFIIQNLVIEDDTNLVMFPGTFDPFTLGHMSIVSRGLELLDEVVIAIGINDSKRTYFTVEQRLEMLRDLFRDNPRIRVVSYDSLTIDLAKQWNARFILRGIRSVNDFEYEKTIADVNRKLSGVETIILFTEPELTHISSTIVRELLRFGHSVDEFVPKGLKLVMKRLFFIIFLPVIAVGAMWSQGQSEGMRKLSLADFAITNLYVDEVDENKLVEDAIRGMLDKLDPHSTYTTAEETREMNEPLQGNFSGVGIQFNMNKDTLYVIQTIVGGPSEKVGILAGDRIIAVNDTTIAGVKMKNTDIMKRLRGESGTVVRVTVLRKGVKEPIEFRIVRDKIPIYSIDASYMADKETGYIRVSRFAVTTDKEFSDAIKELKKKGMKNLIVDLQGNGGGFLTSAIAMADEFLDDGQSIVYTEGRRSPRDDAFASKRGQFQKGRLVLLVDESSASASEILSGAIQDWDRGIIVGRRTFGKGLVQRPIPFPDGSMIRLTVARYYTPSGRSIQKPYDKGHEAYERELLDRFNHGELIYTDSIHFPDSLQFQTLKSKRTVYGGGGIMPDIFIPLDTTIYTDFHRDLLAKGVLNQYPVNYLDSHRKELTNKYKKVDQFVEEFAVTDDMLAELLKMGETEKVKYNEEQYRKSKGLIALQIKALIARDMFDTAAYFRVMNPRNPSFVKAMEIINDDLEYNRLLQPKPMQLIYWCMNKITPEKYRTIIYLILTAVIMIWNEEIKSYPTIFMFNNAVQWLPYFIIGNLFGLKLSRLILDYPSKYIIVLTTLVAFIGLQAIDCNLPAYFFLKAIVLFLCFMSVLSYFNDNKNHICAIVRTLGTSTLFILCIHILIQTPFQRAIMKIFGHREVFTGYIDVALTLLVIYLLIPFVNKYLPWAIGKKRMNTNCDKSRSVKSPAQKRIDSIDLFKGIAILGIVWKHTFHPQWCDLIHISALFFILSGIFFKDEPFIPFLKKKIRTILIPFLFFYILSYLARMAFYFGHFRTLHGFAWDSLLEIFSISNTPDYLTVNIPLWFLVGLFVMQIIFWCLNRVIPRNKYRSCWFLVILAALYAGYGTIESWHTPFMFNIAIECLPYFIAGNLFGLQIARFLSKSSLKYLLAPTCFALFIGFQYLPIDISILAFIKALTIFLAILSLLSCFENSCSMIWTTVRYFGKSSLFIMGIHVLLLAPIQSMARAITGKPNLLTGLICLALTMLLIYVLIPFTEKYIPWAIGRQRQKQDTKLSQTTKMDTIISSWLLWLIIVAILIIIELLTSMIATFCLAAGCLIAMVCALLSWGVEAQLIGAIIGTVIAFILVQTKRGKGNISVQSFISLMKKLLVTSLTCLMMISCNQKENPLLSEFSTPFGVPPFEQIKPEHYMPAFEEGIRQHDAEIAAIIANPETPTFKNTIEPLEFSGMQLTQVNLIFSSLTEAETNDELQAIAKEISPKLTEHYDNISLNGELFARIKTVYENRDKENLDTEQMKVLENHYKDFVRAGALLSEEDKATLREINKELAMLSIQYGDNALAESNAFELVIDNETDLAGLPEAVVTAAADEAAARNKAGKWVFTLDAPSRIPFLQYADNRNLRKKVYKAYINKADNDNEFDNKEIVSKMVNLRLKKANLLGFNTYADFALDDRMAKTDANVNDLINRVWTYAIPRAKEEVADMQKIIDAEGGGFKLAPWDWWYYAEKVRKAKYDLNEDELKPYFSLDNVREGAFMVANKLYGITITELKDMPVYHPDVRAFEVKDADGKHLAVFYTDYFPRAGKRAGAWMYNFREAYVQDGKEVRPIVYNVANFTKPTADTPSLLTIDEVQTLFHEFGHALHGMLTRCHYPSVSGTSVARDFVELPSQINEHWATHPEVLKLYAKHYQTGEVIPDSLIAKMEAASKFNQGFATTEFLAAAILDMRWHEIDEVEEYDVRQFEKEVAQSVGLIDEITYRYRSTYFSHIFTNDYCAGYYSYIWAEVLDADAFDAFKEHGIFDPATAKAFRENILEKGGSEDPMKLYRQFRGAEPNPDALLRNRGLKMKHVVKVILLLLNLLWGLLLVIGSYSAYFPSRIGILVELLFPLNLFACIAFFFIWLAYNPRYIWVPLAALVISWGGIARYCPVHKPQPIDNSQPGFSLMTYNAYFFLDYEGTDTRQNRTLSFILSQNADLVCLQESPGLIAPNPGLKITGEQIDSVNTLYPYRIPTTHGMNFLSKYPATLLFDTVYSESSAIAIYRVKIEDHTVTVVNQHMESIGLTQTDKELYHEITAHPNTDRLDEIKKHLLSKLMNAAEIRNRQADLTAEKIQNIPGNIIVCGDFNDSPLSYSVRKFHSIGFRDAYNELGLGPGITYHANRFWFRIDHILYKGNMEARWLVRQRHKSSDHYPLVTRFVWENSENHMADSIIDKLKQQFRQGSVLLKLIYINVAIFLLLRLTWVVLMLFNIDGYVILPFIEMPSIPYEFITHPWTLLTYMFVHYDVWHILFNMLWLYWFGQIFLMSFSEKQMVGLYLLGGIAGGLLYLLSYNLFPYFDGKEGLMCGASASIIAIVVATAFRMPDYKVNLLFLGAISLKYIALVTIVIDLLSVTSANGGGHIAHLGGALLGYWFIVRWEKGKDLTAPVNKLIDKIVTGFKPRPKIKVSRPSNRSSSRPETDMEYRARKKKENDEIDSILDKIKKSGYTSLSAEEKKRLFEAGKKMQNRSFLGSIPPVTLNLIIVNFIVWLAALTLPKIAGINLNYWLGLHYFAADDFNVVQLITYMFLHDTSGIEHIFFNMFSVFMFGRTLEAVWGGKRFLFYYITTGMGAALVQEAAWYFELRSAISETVALYGWEQTSQLLNNFITVGASGAAFGILLAFGMLFPNAPLFIIFIPIPIKAKYFVIFYGLLELFFGVSGSMSSVAHFAHLGGMLFGFFLIRYWKKKGIGGGGFYYMNKTELINAMAEKAGLSKVDAKKALDAFVEAVSESLVKGDKVALIGFGTFGVTEKAARTGINPATKQKITIAAKKVVKFKAGAELADKVKMRVKFLFVLTPSFSGLSPDVYSETPHNATGHGKEEREMHHSVPVIEGIHTSPLCFAQQNIGEKQRSDSDDERGMDFSDKIFADNLIPVFSEKGRKDYIIFDCGVMSGIATLPIENPVLIFFIVLVIILFAPILLNRIRVPHIIGLIIAGVIIGPNGLNLLARDSSFEIFGNVGILYLMFLAGLEIDMYDFKKSKKDGIIFGLYTFLIPMILGTAISYYTLHLNLMTSILLASMYASHTLIAYPIISRYGISRSRAVPITIAGTIFTVLGALIILAVISGMVRGDLTEFFWLRLSVNITIYSIAILYIYPRLTRWFFKTYNDNVTQFIFILALVFLASYMAQVIGLEAILGAFFAGIVLNRFIPNVSPLMNRLEFVGNALFIPYFLIGVGMLIDLRVIFKSTETIIVAVNMSVVATICKWLAAWLTQKTCHMTKSDRQLIFGLSNAQAAATLAAVIIGHDIGLFNEEILNGTIVMILVTCIISTLVTEKAARRIVIEIQNNEPASYKSPIQNEQILIPVANPDTIENLINLALLLKSPQKKSALYALHVTDDDKKSNFLSQAVLEYAGKVASSADTKLIPIARYDMNITSGIIHTMKEKNITEVVLGLHHKANIVDTFFGAKIESLLKSTNKMILISKCVNPINTVTRIVIAVPRKAEYETGFARWIDRVANMAKQIGCRAIFYAYAETIPYLKARLRAGRYNIRNEFEILESWDDILLLANVVLDDDLFIVVSARPTSVSFNSEADNIPSFLSKYFANNNLIVLYPEQFGTAEPTPVSFMEPLSHDMLNHSEILGLEKIFRQLITYKKRWTHRNRKKKINLMKVAIVGASGAVGQEFLKVLDERNFPIDELLLFGSSRSAGREYTFRGKQITVKELKHNDDFKGVDIAFTSAGAGISKEFAETITRYGAIMIDNSSAFRMDEDVPLVVPEVNGDDAFVRPRGIIANPNCTTIQMVVALNAIESLSHIKRVHVATYQAASGAGASAMAELRKQYEQIVAGETPTVEKFFFQLAYNLIPQVDVFTDNLYTKEEMKMFHETRKIMHSDIAVSATCVRVPVMRAHSEAIWIETERPVSVSEAREAFAHAKGVVLEDDPENRVYPMPLNKAGNDPVYVGRVRSDISNPNGLSFWTVSDQIKKGAALNAVQIAEYLLEHSKMSFRLWAIFVLFFVCEYGLCFGIKRSKLISTFVYYCDWYIMKKAVMKHLKHLLIVSTVTALCACNNTKESPVSLQWEMVKNGAAPGFYESSFTITNTSTKPLESDWEIYYTQLSPRQVKVNEDSPVIIEMINAGYYKIAPSESWTPLAPGDSIKISYLNQGIFTQTLFTPKSPFFVTNNGTQISIPLSIAPFDRKEQWTVQGRIAPSYPDGEKVYADNQALETTYKIQTYDMLPSLKEVTPREGTSIISKDISLSVEDGFADEAKLLIQNLKEMGYNVTDKGQTVIALCHFPQNMQAKNDEHYRLDVKDNYITISGGTPHAIFNGTQTLVSLLKKQTIPAKFENIAINDYPDLLYRGMMLDIARNFTKKADLLKLINQLAAYKINVLHFHFSDDEAWRLEIPGLEELTAIGSRRGFTEDESQRLYPVYYGGWNPNDTTATANGYYTREDFIEVLQYAAKRHITVIPEIESPGHARAAIKAMEARFNRLKGEDMEKAREYLLSESADTSKYVSAQAYTDNIMNVALPSVYRFMDKVSDEIIKMYKDAGVPLATIHIGGDEVPKGSWTGSPLCHKFMEEKGMKDTHELSEYFLENITEMLSKKGVKTSGWQEVALHHSPEMNARIAPRFAGVYCWSTIGKRDVVPYTVANEGYDVILCNVNNLYIDLAYNPHKDEPGLTWGGYVNEFTSFNILPYNIYCSARENTAGEKNNLKTAGKGKIQLTEQSRPRIKGVQAQLFSETIGSFDMVQYYVFPKIFGLVERGWNAYPEWSPVPNDDKQALYEKARAIYNAKIAEIELPRLAADGFNFRVAQPGIKIVEGKLYANSPIPQAEIRYTTDGSEPTATSTLWEAPVDCSATVVKAKLFYLGKESLTTDYKNDMKKIAIISLLLLVCPLIRATEYTVDKVPNVHLDDGRRFVSNPDGILSAETVNTLDQMLFSLQEANTSEVAVVALQSIGDDDIDDFATELFTRWGIGKQNDNGLLVLLILDQRRITFRTGYGIEGILPDAICKRIQTQYVIPQFKQGDYDKGILDGMNVITRILTTPEAVKELAAAPVKKGIDWERIIGIYLTVSLVVSHILLFAMLWNIAHYAKKDAYERYKRLAGFRPYLLAGSFLFPFFVLLLYGGLGRRLKRLRNKPRNCESCGNKMRKLDEEEDNRYLTPQENTEERLNSVDYDVWLCDHCGNTLVYPYENQFTQYQKCPYCHSRAYSFEGDHILRRATTVSTGLGEKRYHCAHCHKTDCKQYIIPIIVAAAVVGSGRRGGGFGGGFGGGFGGGATGGGGSTSGWMNAQAQEKTAQMHWEKLITSKRFGMEQYHDDRHHTRTDFQRDYDRLVFSAPFRRLQNKTQVFPLPGSIFVHNRLTHSLEVSCVGRSLGNNVSAVLSEKYKNEPWCYKLNHLGAITSAACLAHDLGNPPFGHSGERAIATYFSEGNGQIIKQELKNEYHWQDLTHFEGNANAFRLLTHQFQGRRPGGFALTYSTLASIVKYPYSSIQSTKKGKSGFFTSEKQDFLRIARDLGLLPDGDSGERYHRHPLVYLVEAADDICYQIMDIEDAHKLKILTTETVKKLFLDFFDDDRKKHINEVLEIVSDLNEQIVYLRSCVIGTLIDECSTLFCREEQALLEGRFKGALVDHISERPRTAYQNCADTAWTKIYKSSDVLDIELAGNRIISVLLDKFLDAVRFPDKAYSRLLLNKVPEQYEVHSTTLYGKVQAVIDYISGMTDVYALDLYRKINGMSLPSLMKVSVKIVNKSHHALPSYSTLFSAGMDIRANLSEPVTLAPMERRLIPTGIFIALPEGYEAQIRPRSGLALKHGITIPNSPGTIDADYRGEVGIIVLNASDKPFTIEDGERICQMVVKEYCRVEWNEVDSLDETERGAGGFGHTGVKMGIRKYGFTRGLTCLIFVFILCGCASTKGIADKSGELSSEDRRKFDYFYLEAERLKAIGENDAAFDLMSRAADLDTTSAAARFFLAPYYLRMGFYEQARKDLRYAAEKYPDNYWYNVVYANFSQQSNRHDEAIRIWTRLLEQNPDKPEINSALAETYTAKGDMRQAVACYDRMESSMGMMEPITIEKLKLYEYMGDKEAMVAEAEKLQRTFPRNTDYMRLLGDIYLEAGNDSAALSIYNKALDLEPENGYIYLSRAGYYEKRGDTIAYNNEIRNALMNRRIDVDTKLSIFSTYIVGLMKKKQELNRVDSLFAEMLEQYPQEEPVHRLFGMYLSSRKDFSRAEEQYAIAADLAPTNPENWLQLIGLYLYQEKYAEVIRVGKRAIQYVPDQKDIYMYVAVASAQTKSYDEALSMLETGLNYVEENDAGTKSFFYGQMGDVYHSAGDKEKSYEMYEKALSYNASNIPVLNNYSYFLAMEGRDLDKAERMSAQAVKAEPDNATYLDTYAWIFFKQGNYSLARIYLQNALDKTKEPSAELFEHCGDILFMLGEVDEAVTYWQKALEAGSESAELLQKKIKNKKYIEKMNHIRIAVCSIVLLILAGCKGGKELISERPVSQEVRNNFESLMASYPDWNTFSAKGSADLSFGASGSLSASTQLRMVRGEVLQISVRIILGIEVARLYMTPDSLFLVNKMQKQYVAASLQEIGEKLSSPVSLQTVQDALLGRIFLLNSANNAYGIDDFEVMESGSSRWSLSPKRQDERFGYRFDLDETKLLSTQMGSTSGHKEIVCHYTDFIKQGQSENFPTKMKIALTGLSVPVSLNLRYDSSSVSWNGKVGVEKPALSKYTRVSAAQMLKKLSIMKRWLIIWCLLFGFSAAVFSQTLEMEDLRKNRERTLKELNETNKKLNKTLKSAKNSLNELNSITAEIRQQRNLISKINREIAVINRRQRAVKDTIYLLQKDLTAKKRSYANAVKRMGHQRSEYDELMFIFSASSLSQSYRRARYLKEYSAWRKRQAAEIAERKQQLEVLQKQLAKSVAEKNAVLKERNAEAEVLKKQEGSKRTLIAGLKKQEKQLKREIDRKRKQAEALDRKLEQLIAEEERKSSTRADKTEGKNSTAQQRPTKGYKMTKEELALSGSFEKNKGKLPFPLSGSYKIVAHFGRQKHPELRYVQTENSGIDIETTPGTKARAVFNGVVSRIFVTPGYNSTIIVRHGNYLTIYANLSEVYVRAGEKVSTGQNLGKIYSDSQDGNRTILTFQLWKERTKLNPELWLNLMIEIHRYTAAYHRDWNDFVSESSNGTFLFLREYMEYHADRFTDYSLLVYDGNKLLALLPANRSGDVLYSHAGLTYGGLIVTTRNTTAQVLEIMRSIADFLKKERFVKWVYKCIPHIYHRYPSESDLYALFRLEARLMGRNISSTVQLDNPIRLRADRRSRMKKAEQAGLRVVETTDFSPFWKVLDANLQERFHVKPVHSLDEIELLHSRFPDRIRHFVTMRGDETLAGSVIYDTGIVAHAQYTSASAEGKASGALDLLYARLIGEVFADRKWFDFGQSTEDMGHYLNEGLIAQKEGFGGRGVAYDIYEITLMTGGEEKKNIYRTIVKATGLFGGTQVFTILCSIIKTKLVAIWLGAEGVGIIGLYNNTVEMISSLTRLGIGTSSVRDLSKAFKSGDESRFAELVSVVRRWIWFTGLLGAVVMLTFAPLLSRYTFGDDAHIWGYVFLSCTLLFTTLTEGERAVIQASERLRVLARCSVLGSFFALLFSLPLFYFFGISGIVPAIIAHTFSIWVVTVSLGRKMKIKPVKMSWTETYRQGKNIASLGIYMTVSGFVTTLYSYLFVAWLNDRGGTGEVGFFQAGYTLVMQYVGLVFTAMSMEYYPRLSAVCEDKVLLSEHVTRQVETSLLILAPVISLFLIFQNLIIHILYTSAFLAISGYISWAVLGMLFRAFSWSVSFVLLAKGAGRIFLITEIVADSLMFVMYLVGYTHWGLQGVGVAYLLAYLFSMTGIYMVCHLKFGLHIPVRMFVSLFVYSSLCYFVWLLWSNDCLAGAYSLTAFICLFTGFQLKKKIFCKSKMKILLIGEASNLHWTLAEGLRANGHTVTVVSHGSHWLNNKRDVSIVRRGYDLFHSIQYMADIIRHLPQMRGYDVVQVTNPVFFDLRPEKNWAIFKYLKKHNKKIFLDALAIDHYYVKACLDGKTFRYSDFFVGDRPLPHPEREKMLAAWIGGPNERPNIEMAQEANGIIACLYEYYAAYQPEYADKLAYIPIPIDLSINPFHPIKSTPEVVKFFIGIQQHRTAIKGTDILLDVLREIHDKYPRESHIQKVVSVPFDEYNKLLVDCHILLDQLYSYTPATNALAAMARGIIAVSGAEPEFYNFIGEQKLRPIINVLPDRNDIFKQLENLIIHRDQLPRLSTESRQFVEKYHDHVKVARQYLEFWEKHMNILFVYFDKIIQNDNLYVKSLCEEIRRQNGSVECSIDAFWNSPRKYDIVHIQFPEVIFKWRQPSDNGLKALRQRIARLKSMGTKIVYTRHDAIPHYCTDKNKLELYRIVETQSNAIIHLGEYSRQEFARIYPENTARHFVIPHHIYDSCGYAFPSKLTSRNKLGLPTDKFIILTFGSYRNEEEQRLVVDAFEHLPMSDKFLLAPGFYNSCFTNRKTPIQNLLRYRTQKKKFRLDTNRALQLHEKISNTELPYYFSAADIVLIQRKEILNSGNVPMALFFHKVVAGPKFGNIGELLDLTGNPTFDLTDSHSVIEAVAHARQLANTGYGEKNAEFARQNMNTELIAQKTILCYQQIYNLTLHENPTDRMNRLFLFMTILVLGVPVYAQSEKRIDTKEKQENVNSRELKKQLAAIQDSINYKNAVSALEKSNFVLEADQLLFKRGGTAFVSSNTNFVSLSDNRAIVQVAPFNGGGPNGVGGITVEGSASNVKVQTDKKGNTTLSMNVMGTGISATVNIFLFKGSNYASVVISPNYNSNRITLRGRLVPKEYSTVFKGSSFMKQAGIGIVIPVYNRERELRRTFDSVVAQTYRPIHVVLVDNGSTDGSLALCRELKGAYETDDFRITVVEEAKRGPSAARNRGLACVTEEFVAFLDSDDEYIPESVSLYMQAFESNPSADIAGCTIRLIPEQGKPYSAKAVFSNRVEPHLFHSTLGTVRYAVRTTVLRAVGGWPEDYMRWEDWGLGIKLLLFTDRIVWVQTPPLVNVYLHADSITGYRYAPNVPDILRAIAQAHEDVERSDSAQKARLHKLLLYKQMVVAGLCRKEKSPLGTEIYRSTMETAGKDRTMRWFLPMVYRYVSWGGRGSAILANRLLRMNSKDELYYSAIDLLHRLIRTPSISREEDAAAQIICETLQKNRFTPYRAGNNVWTFAREFDSEKPTVLLNSHIDTVKPTDSWSRPPFVPIEEDNRLYGLGSNDAGASVVSLLSAFIHLSETEQPYNLVFLASAEEEVSGQNGIVKALEQLPTIDFAVVGEPTGMQPAVCEKGLLVLDCSTYGKSGHAARNEGINALYKATETIEALRTFEFPLASDLLGKVKLTVTQIQAGTQHNVIPDRCDFVVDVRTNDRYTNAEAVEILKSRFPEVEITPRSLRLNSSAISIQHPFVRRALFAGYEPFGSPTLSDQALMPFPSVKMGPGDSSRSHTADEYIILEEIREAIEVYICLLDRLQIEKSAQMVNQLTSLVRRQAAKYGNREVFSHKDYSTNRWVSTSWNRFAEQVSDMAKAMVILGIREEENISTYTQNKPEGLIVDFAAFDNRAVTVPLYPTSSLDQIKYIIDEAEIRFLFVGGQVQYDNAIIALRECPTLEKLILFDPDIKRAESDSSSVYFEDLIAMGKSADEKVSEEVERRRNAGSPDDLATLIYTSGTTGEPKGVMLAHSNYDEAIRIHLQRLVTCSDKDVSLCFLPLTHVFERAWSYYCLTVGMRVAINVDPKDIQNTIREIRPTIMCSVPRFWEKVYSAIQDNLSKMKGVARRLAERAFVIGRRRNVEYLRAGKRVPLWLECQYRFYDKFVFSKIRRAVGVENGNIFPTAGAPLSDTINEFLHICGINIVYGYGLSETTATVSCFDLVGYEFGTVGSLMPDIQVKLGENNEILVKGKTVMKGYYRKPEETARVFTKDGWFRTGDAGKVNEQGALVLTERLKDLFKTSNGKYIAPQALETRLGEDKYIDQVAVIGDQRKYVTAIIIPAYEALKEYAAQKQIQYRNLEELVKNQKIQALISERIDALQKNFARFEQIKRFTLLPQAFSMEKGELTNTLKIRRSVINLLYKDEIEAMYAMKKVKALHFWIDSYTEIEKSVEELRLAFDFVKEGIVSEEEVDEIYKRTTELIENLELRNMLRREEDKLGVVLKINSGAGGTESQDWASMLMRMYLRWCEQHNYKASIANILEGDEAGIKSVTIQIEGDYVYGYLKSENGVHRLVRVSPYNAQGKRMTSFASVFVTPLVDDTIEININPANISWDTFRSSGAGGQNVNKVESGVRLRYQFKDPYTGEEEEILVENTETRDQPKNRENAMRQLRSILYEKELQHRMAEQAKIEAGKKKIEWGSQIRSYVFDDRRVKDHRTNYQTSDVQGVMDGKIDDFIKAYLMEFAGEENNGMDKLTLIKVGGKIVEEQETLSRLLVAFAAIPEKKVLVHGGGRSATAMASRLGIESRMVGGRRITDKSMLEVVTMVYGGLVNKSIVAGLQAVGVNALGMTGADMNILLSDKRLAGEVDYGYVGDVRHADGKALTGLIEMGVVPVIAPLTHDGKGSMLNTNADTMAGETAKALAPYYDVSLVYCFEKKGVLRDEKDDESVIPEIDFSLFQEYREKGIIQGGMIPKLENAFEAIRHGVCEVIITRADCIGQKDRGTRIVGMEPVGYLPFYFMKHLTFQISIFLLLLISFTSCEKEYPTNVDTVWTRGLISDQSPFEFLNKNIIISWNNGKVEGQENRITTFTDLGKRETEDIDLNAIDIPQEGESYCYPQIGHLYFVHQAWKSSSRIQNHCGYFLVIESLRNQEGIIILSSEYTPSGWEWIDRYMKNIILFDVNQQHFDLLPLAFTRPVSDIRIGILTIREKWEHRLPGMYSYLTPEYMAAKYPAALSDDNIFIASHILPDDSLVKQISDLDPGEAIVCNQELLAFRGNEADFRNERYNRTIEYGHTLKCIRHLYDIFLMNGECLEADFRLITNGRTSEKLSDSNRIIGEPCFPDGTPKIFLEPGAHAECAIFNVTNGPIYLGKDCEIMEGSCIRAPFAACEHAVVNMGTKIYGATTLGPYCKVGGELNNVVMFGFSNKAHDGFLGNAVIGEWCNLGAGAVSSNLKNDYSEIKLWNYPTRRFLRTNLQFCGLIMGDHSKAGINTMFNTATVVGVGVNIHGAGFPRNFVASFSEGGTAGFTDVQLTKFYAIAEKMMARRGRTLTEADKTIFEAIYNQAEQLKMEKNRFVQLVADMLYRTDRESLNLETRYKSLEEWNYLFEVSLAMMLEEEYQVEVTPEDFDCTRTLGELFHRVCEPSLADKNMCGLAGIVGEVDLMEQVLLHMSAAQNHRGKETPNSWVSSFIDARVGLMHNRMKTIDMAVAPKQPFEDNDTGLVVMLDGEIFNYEDVRRQLENYYSFTTRGMCEVITKAYDRWGDGCFDRFEGYFSIVIYNRWSEELLLCRDRFGIKPLYYATQRGNLFFASEIKALFAGGIRSLLSAERWASYLAYSTYGSPYETFWEGVHQLPAGFLLHYNGYSLVEKRWYEFEKRVSLWSEESPERLPEAFLEQMYRSVGYSLMGEMEKGLSLNGSLESALFISLMKEIGLPRSLKSYMHYRGKLHQSGVLWSAEMLAETPLPMEQVKITKSMLLKELDYLARWQEEPIDGLNTITYSAFFRVMHKRGLSVLSGGWGLNHFLGGVSLPGDSSTSLVPSEVLSADFRRLARKPEYRRSFVSENENLRFCDLCYERIPHLLRSVDKMSMYYGVQIRNAFLNHNLIEIAFALADGSSGKHRKAWFSDKIVMPLLPEKIRLAPKNEVEGLYDIPTELKGWADEVVHDLRFGQVSEWFDYPRLERAWENPESGVFSDPVKAWKLLSLCLQLKSLTMRLEEIVFVSPLGLRYLCLPKYISMKFTEQKLKGVFVIEPQVFGDSRGYFMESYKKELFEKYIGVVDFIQDNESRSSYGVVRGLHFQRGEWSQSKLVRVTQGRVYDVVVDLRRTSPTFGQYVGIELSDENKKQLFVPRGFAHGFAVLSETAQFCYKVDNVYAPHEEVTLFYNDPHVAVQWPIKAEEMLLSEKDKKGLGFEEIEVFEMPTIQQLVRKGRVVLEDKSKSPALDSCPQRRGVCVRVYTTTPKKPNSAMRKVARVRLTNGKEVNSYIPGEGHNLQEHSIVLVRGGRVKDLPGVRYHIVRGTLDTAGVGGRTQRRSKYGAKRPKAGAAPAAKGKKMRKAKPKKRVVLPDPVFNDVRVSKFVNHLMYDGKKNIAYTIFYSALEIAKSKLPNEEKSALEIWKKALENITPQVEVKSRRVGGATFQVPTEIRPDRKESISMKNLIIYSRKRGGKTMADKLAAEIVDAFNEQGGAFKRKEDMHKMAEANRAFAHFRFMAKSDAHLKYTRNIGIMAHIDAGKTTTSERILFYTGLTHKIGEVHDGAATMDWMEQEQERGITITSAATTAFWNYKDEKFKINLIDTPGHVDFTVEVERSLRVLDGAVAAFCAVGGVEPQSETVWRQADKYNVPRIGYVNKMDRSGANFFEVVRQLKDVLGANPCPIQVPIGAEETFKGVVDLVRMKAIYWHDEAMGADYSVEEIPASLQAECDEWRDKLLEKIAECDDELMEKYFTDPSTITEEEIMRAIRKGTLAMQIVPMICGSSFKNKGVQPLLDAVCAFLPSPVDTPAVVGHDVNDPEKEIVRHPSFDQPMCALAFKIATDPYVGRLCFFRVYSGEVVAGSYVLNSRSGKKERVSRLFQMHSNKQNPKESIDCGDIGAGVGFKDIRTGDTLCAEDAPIVLEAMDFPAPVIGIAVEPKTQKDLDKLGIGLQKLAEEDPTFTVATNEETGQTVISGMGELHLEIIIDRLKREFKVECNQGRPQVTYKEAITKPVELREVFKKQTGGRGKFADIIVRVEPSTREEGGLEFVDEVKGGNIPKEFIPSIQKGFTTAMKNGVLAGYPVDSLKVTVIDGSFHPVDSDQLSFELCAIQAFKKACEKAGPVLLEPIMKIEVVTPEESMGDVISDLNKRRGQIEGMESSRSGARIVKATAPLAEMFGYVTALRTITSGRATSTMSFSHYSEVSSSIAKNVLTEVNGRVDLLMSQKIRIKLKSYDHNLVDKSAEKIVKTVKATGAVVSGPIPLPTHKRIFTVNRSTFVNKKSREQFELSSFKRLIDIYSSTAKTVDALMKLELPSGVDVEIKVMPGLLGKKIGMTSVFSAEGKNVPCTVIEVGPCVVTQLKTVEKDGYEAVQVGFIDKKDKHTTKPEAGHFKKAGVTPKRHLAEFKFDTEYKLGDTIAVDLFEGAEYVDVIGVSKGKGFQGVVKRHGFGGVGQTTHGQHNRLRAPGSIGACSYPARVFKGTRMAGQMGNHRVTVQNLQVLKVIPEHNLLLIKGSVPGSKGSIVIIEKMELSVYNIKGEDTGKKVVLDDAVFGIEPNDHAVYLDVKQYLANLRQGTHKSKERSEVSGSTRKLKRQKGTGGARSGDINSPVMVGGGRVFGPKPRDYRFKLNKKVKALARKSALTYKAQDNAIVVVEDFSFDAPKTKEFVNLLKNLQVADKKSLLVLSEQNKNVYLSSRNLTGANVITVSELNTYKVLDNKALVLTESTVAAINNFMGIIIKPIVTEKMTAMGEKYNRYGFRVDPKADKLQIKKAVEEMYNVTVVSVNTMNYRGKNKSRYTKTGLISGRTAAYKKALVTLKEGETIDFYSNIMAVRKLKPTTPGQRHKIIGAFDTITASAPEKSLVVGVRKSGGRNNEGHLTMRYIGGGHKRKYRLIDFKRNKDGVPATVKTIEYDPNRSARIALLFYADGEKRYIIAPNGLEVGATLMSGENAAPEVGNALPLKNIPIGTVIHNIELRPGQGAFLVRSAGTFAQLTSREGDYAIIKLPSGETRKILATCKATIGSVGNSDHALERSGKAGRSRWLGRRPRNRGVVMNPVDHPMGGGEGRASGGHPRSRKGLYAKGLKTRAPKKHSSKYIIERRKKMSRSLKKGPYISVKLDKKVAAMEASGKKSVIKTWSRASMISPDFVGHTFAVHNGNKFIPVYVTENMVGHKLGEFAPTRTFRGHAGNKKKMGARKRESANRRKEALKTQYFAKLNNVPTSPRKMRLAADMVRGMEVFKALGVLKFSNKEASQRLEKLLRSAIANWEQKNERKAENGELYISTIYVDCAAMLKRLRPAPRGRGYRIRKRSNHVTLFVDTINKNDNKNMGQKVNPISNRLGIIRGWDSNWYGGKNYGDRLLEDSKIRKYLNARLAKASVSRIVIERTLKLITITVCTARPGLIIGKGGQEVDKLKEELKKITDKDVQINIYEVKRPELDAEIVASNVARQIEGKIAYRRAVKMAIASTMRMGAEGIKVQVSGRLNGAEMARSEMYKEGRTPLHTLRADIDYALVEAHTKVGVIGVKVWICRGEVYGKKDLAPAFTNSAKEARGGNGAPKKGFRKPKTNRMLQPKKTKFRRQQKGRQKGNAQRGNQLAFGSFGIKSLDTKWITGRQIEAARVAVTRYMQRQGQIWIRIFPDKPITKKPADVRMGKGKGNPEGFVFPITPGRVIIEVEGVPYEIAKEALRLGAQKLPVTTKFVVRRDYDASQNVMKKAEIKELGSKELQERLDAAVAALNQLEITHSISPLDSPAKITHERRMIARMKTELRKRELNKKMESRNLRKERIGVVSSNKMEKTITVTVKWKEKHPIYGKFVNKTKKYHAHDEKNECNIGDTVRLMETRPLSKTKRWRLVEIIERAKMIQQESRLTVADNSGAKEALCIRVLGGTGRRYASVGDVIVVAIKSAIPSSDVKKGAVSKAIIVRTKKEIRRQDGSYIRFDDNACVLLNNAGELRGSRIFGPVARELRAVNMKIVSLAPEVLMSKLHIKKGDTVYVNAGEDKGKTGRVLSVLVKEQRAIVEGINMVSKSTKPNAKNPQGGIVKKEAPIHISNLNPLDPKTGKPTRIGRKKNEAGVSVRYSKKSGEEIKMSNTANLKKDYLERIVPALQKEFNYSTVMQVPVLKKIVINQGLGEATADKKIIETAINELTAITGQKAVATLSRKDISNFKLRKKMPIGVMVTLRRERMYEFLERLVRVSLPRIRDFKGIESKLDGRGNYTLGIQEQIIFPEINIDSITKIMGMNITFVTSAKTDEEGYALLKAFGLPFKNAKKDMAKESMKAREVKRAKLVAKYAEKKKQLKAEGNYEALQLLPKNASRVRLHNRCKITGRPKGYIRQFGISRIQFREMASAGLIPGVKKASWMTDPIADYLTRLRNAIKAHHRVVEVPASKLKKEITKILFEKGYILNYKFVEDGPRGTIKIALKYDPVNKVSAIQKLIRISSPGLRRYTGYKDMPRVLNGLGIAILSTSKGVMTNKEASDLKIGGEVLCYIYMSRIGKLPIVIPAGVTVTISGNEVKVKGPKGELVQTVSPEIKVEMVDGEIHVTRPNDEKQTRALHGLYRALIHNMVVGVSEGYKKELELVGVGYRAQSQGQVLELSLGYSHAIFLRLPAEIKVEAKSERNKNPLIILESCDKQLIGQVCAKIRSFRKPEPYKGKGIKFVGEVIRRKSGKSAGAKMTTKIERRIKIKTRIRGKISGTAERPRMTVFRSNKQIYVQLVDDLAGKTLAAASSRGMEAAPKKELAAKVGQEIAKKAQEAGITSVVFDRNGYLYHGRVKELADAARNGGLKFMTGKNNRVKSTNDIELKDRLVAINRVTKVTKGGRTFSFSAIVVVGNEAGIVGWGLGKASEVTTAIAKGVEAAKKNLVKVPVLKGTIPHDQLAKFGGALVYIKPASPGTGVKAGGAMRAVLESVGITDVLAKSKGSSNPHNLVKATIAALCELRDAATVAQNRGISVEKVFKGMEKIKIKQVKSRINCPAVQKKTLDALGLKKLNSVVEHNATPQILGMVEKVKHLVKVVEMDLSNLKPAEGSTKTRKRIGRGPGSGLGGTSTRGHKGAKSRSGYKRKIGFEGGQMPLQRRVPKFGFKNINRVEYKAINIDTLQALADSQRLDKIGIETLVAAGFISSKQLVKILGKGALTAKLEVSAHAFSKTAEAAIVAAGGTVVKLMRAIETIKNIWKIEDLRKRIITTILLVLVYRVGSYVVLPGIDPANLDALRSQTSKGLMQLLDMFSGGAFSNASIFALGIMPYITASIVIQLLGMVMPSFQKLQREGESGRTKLNQYTRYLTVIILLMQGPAYLVNLKVQMGSALFPSGWLFIVSSTIVLAAGSMFIMWLGERITDKGIGNGISFIILVGIIARLPLAFAAEFTSRLASKQGGLVMFLIEIIFLLAVIAAAILLVQGTRKVPVQYAKRIVGNKQYGGARQYIPLKVNTAGVMPIIFAQAIMFIPITIAGFSASNASSFWSSFMSMTGFWYNFVFAILIILFTYFYTAITVQPTQMAEDMKRNNGFIPGVKPGKKTADYLDSIMSRITLPGSIFLAIVAILPAFAQICGVSAEFSQFFGGTSLLILVGVVLDTLQQIESHLMMRHYDGLMKSGKIKGRSGAYMIYLKTDEEIELMRESNLLVGMTLGEMAKWIAPGITTLKLDKIAEEFIRDHGAQPGFLGYGGFPNTLCISVNEVIVHGIPNSYALREGDIVSIDCGAVKNGFNGDSAYTFCVGEVVPEIRQLLKTTKESLYLGIEHAVEGKRIGDIGHAVQTYCEARGYSVVRELCGHGIGKKLHEEPNVPNYGRPGTGPLLKNGMCIAIEPMINMGSRNIVIERDGWTTRTRDRKPAAHFEHTIAIKGGKADILSSFEYVEQVLGEKSIMAKQSAIEQDGVIVEALSNAMFRVELENGHEITAHISGKMRMHFIKILPGDKVRIEMSPYDLTKGRIAFRYKMKVRASLKKRTPDSKIVRRHGRLYVINKKNPKYKQRQGMAIRIVGVDLPQNKRGEIALTYIYGIGRSAANSILSKAGIDRDIKVKDWTDDQSAKVREIISTEYKVEGDLRTEIQLNIKRLMDIGCYRGIRHRIGLPVRGQSTKNNARTRKGRKKTVANKKKATKMAKKTVAAKKRVVKVDAVGQAHIHSSFNNIIVTLANSEGQVISWSSAGKMGFRGSKKNTPYAAQMAAQDCAKVAFDLGLRKVKAYVKGPGNGRESAVRTIHGAGIEVTEIIDVTPLPHNGCRPPKRRRVMARYTGPRTKIARKFGEAIFGPDKVLTKKNYPPGQHGINKRRKTSEYGVQLREKQKAKYTYGVLERQFRNLFEKASRTKGVKGEVLLQLLEARLDNVVFRLGIAPTRAAARQLVLHRHIVVDGKVVNIPSYSVKPGQVVGVREKAKSLEVIADALAGFNHSKYPWLEWDESLKSGKLLHLPERADIPENIKEQLIVELYSKMAILAFQKPDKVLMLEADNFFGKFEFRPLEPGYGVTVGNALRRILLSSLEGFAITSIRIDGVKHEFSTIPGVIEDVTNVILNLKKVRFKQVVEEIENEKVTITVSGTEVFKAGDIGKSLTGFEVLNPDLVICHLDSSASFQIDITINKGRGYVPADENRNPADDVNVIPIDSIYTPIRNVKYAVENFRVEQKTDYEKLILEITTDGSIHPKEALKEAAKILIYHFMLFSDEKITLETNDADGNEEFDEEVLHMRQLLKTKLVDMDLSVRALNCLKSADVETLGELVVFNKTDLLKFRNFGKKSLTELDELLANLNLSFGMDISKYKLDKEMRHNKKFNHLGRTKAHRDAMLSNMATSLILHKRIFTTLAKAKALRVYVEPLINRAKEDTTASRRVVFRYLQSKEAVTELFKEISVKIADRPGGYTRILKTGNRLGDNAKTCFIELVDYNENMLKEKVAKKATRTRRSKKSAAPAAVTAEAPANEAPVSEAPATPVEEKAAEMFLYHNKEPAEGTILSLIPSILLPKKEKAPLSGAFSFPYMKQMRIHYIKRAALSLCAAMSLGLSATSQVSQSVTTAQNAQAEPLTPPYSETFADESFLESYTIIDSNQDGTKWEPYFGKVQISYNSELAMDDWLITPALNLEGGKMYSFSVNILTGNETTQETFEIMFGKDKTPEALVNPIIEKTSIAHTVYKAYTGTISPTESGIYYIGIHGCSSADTYSISVNNLTVGAAAGASTPSAPSNLVVNTRTNGELKADISLTAPTLDLNGQDLTELESVKLMRDGNLIKTFSTPEPGSELTFVDEVPECSRYTYSAIAVNASGESPAVETKAFVGTLEPSDPTGITLVETSTPGEVTIGWTPVTTDIRGNNLDPEFVTYRIYSEGSQSNLLFSNISGTSKTFKALDDTSVQTFVQYSVVAETKGGISNYVYSPLLPIGPAYSTPYHESFAEGKASHIFGIYPEDYALWSTYTTEDSEIESQDGDNGFLGSEGSYSEDTGTFDTGKIDLSGLTTPTLTFYIYNIIGEDEVNNNELSVSVVHNGNPTLLKTFKMYELSDKDGWVKVEVSLNDYKDQIIQLRLFSHHALLPYILIDNIRIDNLNGSGIETIVDSSTKIYGGTGKIIVTGANGQTLSIFTPDGRLISTQKVTETDCHLTTIPGIYIVKVGQFATKVVVKMARYDFYPSYQTNKSNIDFIPIEKKYSKLYYSRQILYIFNFNIFIHFSFVYKFVLKVMKIETIKAREILDSRGNPTVEVDVILDSGIMGRAAVPSGASTGVHEALELRDGDKNRYGGKGVEKAVRHVNDVIAKALKGANPFEQSSIDSALIALDGTATKSKLGANAILGVSLAVAKAAAAQLGMPLYRYVGGVDTYVMPVPMMNIINGGSHSDAPIAFQEFMIRPVGAASFKEALRMGAEVFHALKSVLHAKGLSTAVGDEGGFAPALPGTEAAIETILEAISKAGYMPGRDVKIALDCASSEFYIDGVYDYTKFEGANGVKRTTQQQAEYLQDLILRYPIDSIEDGMSEEDWDGWRLLTDLIGDKCQLVGDDLFVTNVEYLTKGIRQHCANSILVKLNQIGTLTETLRAVQLAQRNGYTAVISHRSGETEDATIADIAVATNAGQIKTGSLSRSDRMAKYNQLLRIEEQLGDIAQYGYKQVNMGFFLEKMFNYKIVRYSLLYNFHVIQHKKVGKKFGAETVQFRNGSAIVNYYTADGKRTGSKYLTPLTTVVIPAGQTFGSTSGTAAMSSHVTARRGSLEYAGADFESDTLIRIHNGDGYLDCSEQDFRYFVRDYQGNIRTVYGSAVAKLIPVEPPFSLTNRGAIGGDKPPIRPKPIEHTVTYQRMQYYPFGLPYEAHYQPEEQPYKYGGKEFIELHGYDSYDFDARMYYPALCRFMTMDPLCEKYYSISPYAYCNNNPVNYVDPDGRCEKYYSISPYAYCNNNPVNYVDPDGRDIWEIDYDGRIINRIENKTQDAFYMVAKDSNGDYQRTFSVDEDGNKKYNSINFEYGVITDSKKAWFFNQETSFSINNESDGANLFKFFANNTKIEFGLINTQNNGSLVMTNHQEHSIKVSKQAKRLSMNGATVTSIVHNHPNNSYPSGFRKKDNHGDKYAAALISNSKGYRVEHYVYQPQKGRLIMYDKNKIIGPIPWEYIFSSNKMRKIISFIFITWFISCSGNRDIVLTDFTKELISIYLNDSEHIQAQKRKDEIILISTTDSLYYTLLIFSNNSKSYKYETFDFVGRTIYMGHSIKAFGDKIPIFYSGNNFVKQKRQDIPNMKEYDPSVWQVSFYKDSSFCKMRTYKTTPSENIADIENLAKKYFKISRPSTNEIYQLYEVETEPQFILGNDSLRQIITSNFKRVKRAPMQGKIPVVVDVLIDKHGIAKLIGIRKSSGDTVIDEEALKVAKIICQYKFIPATHRGETVETIFPIMFLDNDVKAKMNFTFGRLSYFVIKDSNGNMTADLDRDIVAIRYNMLNLPDTVQFRNGSAIVNYYTADGKRTGSKYLMSTMKNCARIIFGVLGISFLGFRLDATVPAGYYYAADGKHGAELKTALYEIISSMHTLGYGSGEDATWEGFSRTDRKDDGSVWDRYSDEIRYFDGFNAVGGMHIEHSFPKSWWGAYENNAYRDLHHLFPADGSANSAKNNLPLGEVTGVSGFDNGVSKVGKNGWGVDYTDRCFEPADEYKGDFARAYFYVVTAYENLCDYWQSPMLDNNTYPVWKEWALDMLLEWHSQDPPCERELARNDSVYTIQGNRNPYIDYPDLVEYIWGAHREDPFRFPAETLPFLALPRRDQIMDMGVIMLGDNKSEQLDILGNNLTSSLSLSWAIGGIFELSDYEVSAQEVHDGCTVEISCRELRKGEYRDTVIISGGGIETPYRIPVQVVSVPSFIETSASDVTATEALIHWINYPEAIDYQVSLWSGNTSAGDLIISAYVEGSGYNKAIEIYNGTGVPVDLSAYSLRMEVNGSGSFVNDTPLGPSILNNGETYLLLNSLSTDGELIAKASQIIPGGETSPLNFNGNDAVALCRDGIMIDVVGVAGEIAYWGQDKTLYRRSEITHPTSRYNGKEWISSPKDDFSRIGLFRMQLDDKREYIQTDKSIGLVQNYRFTELRPLTRYTYQVSAVIPLGIVKAAYSMQFETDSLAVPQLLDASDITDSTFRINWEEVQGADNYEIICFTQTGEQHVYTEGFDEVDSSGKPLPDNWEGTASGNYTSAASSGVSAPSVALKNTGEYLQTPRYNEGIVKFSFMYRFASSGTGSYIVVEKESDNSWTAIDTLRYVDTSKNYPEYTFSIDEQVTSVKVVYAHKEKGNVAVDDASITYGACVKDIFSQEKVGNITTHVIEGLSPQTEYGYQVRSVCKDVVSNWSSVQRAVTADISAVTSVRSCDPIVYVSGRQIIIATLCGSERISVYNLSGQMLYAVAAEGKNQIAINVDRGIYIIKIEARNKIFNKKIILMNCISRNCLLLVVLTCLFPFFVFAEIPAGYYDDAVGKSGEDLQKSLSTILNDATDVGYNGLWNLYKTTDRRSDGKVWDMYSDITNYTFGTDQCGTYGVEGDCYNREHSVPKSWFSEQSPMKSDVWHVYPTDGKINGMRSNNPFGEVGSGASSSKNGFSKWGKCVTPGYSGTVFEPNDEYKGDFARTYFYFATRYQNRITNWGSIFVSNYPHIIDWQLNMLLRWHEQDPVSQKELDRNEAVYESRQGNRNPFIDYPELVDLIFGDSRNIPFMPDGGDAPYIEAPRNGSTVDMGIASVNSSSPVTVQLSVRGRNIESAVSVEVGGNDSECFSVNRRELTADEVNNGTTVELAYRSSVVGSHEAVLEISGGGLKSPIIVNLKGQAIDDFVALPAKDITKNSFVAVWTPKSEATDYELNVWYDDYSSSVPEKDILDVTFSSKPDSWTYEGYTAVESGKLRLGSGSKDGSATTPILDLSAGDVSITVVAEPYKEDLSVLFVSVDGQEISQINLDGTTTTTIPVKEGTKTSTITLMAKSDHRVYLHSVVVKSGGGSTPVVLEGYPRRVGDVNEYMVSDLTPVVQYHYTVTPYIGEEAQSVSNTISVSTWSAAVDDMEADRVLIFTSGNVLHILNAPMNAVASWYTMDGRLCGSRILHSEEVEWELPEGIYIVKVVSPSLQNTVRVHSSRMKLFHSIKIGLSDIYYIWRREYRAVFHDLGIVLFFFALPFAYPIVYAAVYNPEVVREVPMVVVDNARTPLSRELAREMDATPNAHIVSYCADMDEAKHMMYEKHCYGILFIPEDFSRKIERGEQSVVSFYSDMSILLNYKGFLIALTDVTMNLGGKLQTQALGGATQEQINVATQPIPYSSINLYNPESGLASFLLPAILVLILQQSLILGIGMMAGGIYEHRQLHLFYSGREHMHNNVLHLVIGKSLCYFSLYILCTAYILHFIPWLFKYPQIGSQVEIYSFAVPFLLSSIFFGMTLSIFVRERESSFLLFVFTSVIFLFISGITWPRYAMPEYWKWLGALIPSTWGIEGFVRMNTAGAGIYDVRHAYTMLWILTGVYFVTTCLVYRYQIWKDKKRGFSGVLDSGIDMSERMEYQTGLWATIVRELKQLVSRPIYVLCMVGAPLFSCIFLLSLMHEGLPHKIPVAIVDHDHTSTSRNFIQQLGSQESVDVAYKLNSFTEARELMQSGDIFGFLIIPEDFEAKAIAGRQPEISFYTNDAYYIPASLLYKSFKTMSVLASGAVVRQVLLSAGAEESQIMAKLQPIATDMHALGNPWISYSVYLNNSFLPGLLQLMILLVTVFSIGSEMKRATSREWLRTADDSIIIAITGKLIPQTIIFFSMGLLYLSLLYGYLHFPMHNSIWHMIFAMFLLVVASQSFAVIIMCFAPSLRIGLSVGGLVGVLSLSIAGFSFPVPAMYLPFQAISYVLPVRHYFLIYVDQALNGIPLYYSRVHYVALILFAVASTPLLPRLKKALMRQVYVPMENLREKKERSLVVGLIALIVIIVVLALIGLFLLKPEPQIIQGQAEATQVRVSGKLPGRVVEFMVEEGQHVLAGDTLVHIHSSLVEAKLSQAEAMETVAKAQNKKVDSGTRVELLNSAYDMWQQAQAGLTIAKKTYERMQSLYKKGVVSEQKRDEAEAAYKAMVATESAAKSQYEMAKAGAQAEDKAAAAAMVAAAQGSVAEVESILSDSYLTAPTDGEISDIFPNVGELVSLGAPIMNVLKLDDMWVSFNVREDLLENLTMGAEVQAIIPALENKEVTLKVFYIRDMGSYAVWRATKVTGQYDAKTFQVKARPVEPVDNLRPGMSVLLKRDKKMKINGSIWAGRALLAAFLLSFLMGSAQQPVSLDSCRQMALKNNKQLRIAEEKVKGAGYTKKSARGAYFPGIDFTGSYMYNQKSISLLESDQYLPTKTFDLASQEYKYNVVTNPATGQPILNNGQPIPSTVAMIPKEAFEFDVHNVYAGLVTLTQPIFMGGKIKALNDIAGYAEKLAVSQKNTAEKEIIYQTDEAYWQVVSLVHKRKLAESYTALLDTLNRHVQEMIAEGVATQSDGLTVAVKLNAAQITLAKVDNGLALSRMALAQICGLPVNSIFTLEDESLERVAPQETPLSYNMEEVFKNRNEVLSLNYAAKIYEKKKNLALSDMLPKLALVGTYSFTNPNVFNGFKNEFDGMFSVGVMLNIPILHWGKNYNKIRAAKSEAVVAKLELADVKEKIELQVSQAAFKTSEAYRTYKMAVKNLEKADENLRNAQLGFQEGVLTTTNVLEAQTAWLEAQSEKIDAEIDTRLCEVYLAKALGTMKYMHPALHRKNTPSLALNKYLKILVFYFYYFLRIGFELFHAVFESYFRKHFSMGKALPDFIDILALSIICGEADLNFSDESLVDKCIPVFLMNGMKRSNLVWVVIAVLVVALLGTGIFIYMQHKAMSDFKEQVEIDKQRSELEKEYSDLAAQYDQFEGQKMMFNNDSLIEKLDAEKVKVQRLLEELRTVKNTSSARIEELKRELTTLRGIMRHYVMQIDSLNVANKQLREENAKVTRRYREVAQTASQLKQEREELTEKVTLAAKLDAVGIVVTPIDSRGKTAKKIKKTDKIKITFSIAKNVTAEVGEKYIYARIVKPDGDVLVKDRADVFPFEDREINYSCRKLIEYTGEELNDVTMYWAVEEFLYPGEYRVDIFADNYKIGTRSFTLKQMLNYILPQIRKRNHAALHFTKEILEGQNLFVIKIIKLTPLQAIFPIFVKSMGKIIDFFKKHPIIKTLVLMIIVFFLLIALTLYGLKLYTRHGKAVIVPEVKTMILPDALRILDREGFRYDIIDSLFIDGAVPGSVIEQTPAGGSKVKDGRIIYLSINAYSPRMISCPKVSDMSLRQALSTLESVGLTDIKTQNVPSEYPDLVIGIQYKGENLEQGDKIPAGSSLTLLVGDGIPEEYPDSTIDEIPQNAEEAPLTDESWFNMNTCDEDIEADDKIIAEEGERELYEHFRFVADKGQNLLRVDKFLVARLESSSRNRVQQAAEAGCILVNGKAVKSNYRVKPLDVVSVVMDRPRYEFEIIPQDIPLDVVYEDKTVLVVNKPAGLVVHPGHGNYSGTLVNALAYYFRDTPDYDVSDPRLGLVHRIDKDTSGLLVIAKTPEAKTNLGLQFFHKTTQRQYVALVWGIMENDEGTITGNIGRSLKDRLQMTVFPEGDFGKHAVTHYKTLERLGYVSIVECKLETGRTHQIRVHMKHIGHTLFNDERYGGDQILKGTTFTKYKQFVQNCFEICPRQALHAKTLGFKHPVTGEEMFFDSPIPQDMTLLFDKWRNYTANRDIMECPKEFDDIRPFYDSEFHDKMKVLVTEPGFEHAVRYVLRDINYELFCQELLTIDNKKDFQLLVMRSFLEGLTQKTTKGLTGNNLDVLDKAKSYTFMSNHRDIVLDASLLNLLLIRNGIKTSEIAIGNNLLIYDWISDLVRLNKSFIVKRDVGVRQMLDAARQLSGYIHFAITKKNESVWIAQREGRSKDSDDRTQESLIKMLGISGEGDLINNLKEINIVPVSISYEYDPCDYLKAHEFLLKRDNPDFKKSQRDDLHSMEIGLLGFKGRVHFQISPCINDELDKLSAIDEKSELLSNILKVIDKAIHTNYKIYPGNYIAYDILDGQKRFADRYTNKDQTTFANYLNSQLAKIPDVTSKDKDFLKERILSMYANPLKNQLIALGQEAMRLPLLLILLPLLALSADFYIFRRNFRHKSKWIKILWWGLSLVTLLLVCIGVTGLFAFPGKLDINISMWIFYIFFLVYMPKWFYSIFSLFDYVPRLWKRKKGKWGHMIGTALALYVIGSMLYGAFYARQHPIYNYRTISFPNLPEDFDGYRIVQFSDLHLETLGSAANYLPRWINRINQLHPDLIVFTGDLVNRRGNELPPYMNELSRLSAPDGVYSILGNHDYGDYFHWGNPEEKEQTLRSLIVDEEKMGWTMLNNRSVFLRRGNDSIALIGVENWGLPPFPQYGKLDLAYSSLNDSVFKILLSHNPLHWKHEVIPHSNIDLTLSGHTHAMQLKLGWKGFEYSFAEPLYPEWSGLYTAPDKHQMLYVNEGIGCVFLPMRIGARPEITIITLKKESMNTSIYKLLSQSLGFAEKQIEKTIELLDNGATIPFISRYRKEATGSLDEVQIGNIKEAYDKLCETEKRKKFIISTIEEQGKLSEELKQRIDSCWDITELEDIYLPYKPRRRTRAEIAREHGLEPLAKIIMAQKSENIKTSAARFVTPEIPDEQTAVEGACDIIAEWVSESERARNTIRRCFEHSAVVHAKVIKGKETEGDKYRDYFEWSEPLRRCASHKILAVRRGENEGILRVSITPDDDTAIERLQQIFIKGSGETSNLVDKAIKDSYKRLLRPSIESEFAAASKEKADNEAIRIFAENVRQLLLAPPLGQKRVLAIDPGFRTGCKVVCLDAQGNLLHNETIYPHPPRQDSVGAARKLTQLVESYKIEAIAIGNGTAGRETEQFVTNLRYDRKIQVFVVSESGASIYSASKVAREEFPEHDVTVRGAVSIGRRLIDPLAELVKIDPKSIGVGQYQHDVDQTKLKKSLDRTIEFCVNSVGVNVNTASKHLLTYISGLGPQLAQNIVDYRKENGDFARRTDLLKVPRMGAKAFEQAAGFLRIPHAQNPLDNSAVHPERYPIVEKMADDLNCTVSDLIENKELKKQLDLKNYISGDVGMPTLSDIIAELDKPGRDPRRYIEMMEFDAKVKTIDDLQEGMILNGIVTNITQFGCFVDIGIKENGLVHISQMADRYISNPTEIVSMHQPLKVRVIGIDRERKRIQLSLKDVSMNTVLISLASNTPDKLRQMNNAFAELQEMGLVAASSSIYETVACGSIKSPNYLNAVVKIFTDTDHQELHNVLKTMEKAHGRTPESKLSGKIPLDIDIVVWNGEIIRPQDWKQDYFQTGLKELEQMTMKTIEETLLNRTSVRRYEYDKIPSETLDFIYRAIANTPTSYNGQQFSVIAIDDQSIKEELYAITNQKQIKTCATLLVFCADYHKIDILAQKKRIDNPHFENTLDGVMVGIIDAALAMQNAVVAAQAAGLGSCCVGYARTANPEKIAEILKLPEGTFVVCALTLGIPRESPDVKPKQPLSLVIHHNHYRTDDMAPELEMKTKAILSSLLVCIVTTLSAQINLNDSTVQVVAYWSKGDSYDYLYDYYKYNIQGKDTISWERTISKINITVIDSTENSYTLQAVYDTPNAIRSGSDSISRELTSRISRTFGNDTVIVETNELGTIKRLVNFDKLRSRYLKAAEMTAEALSAQQGSEAQKDSLFRFLKSTLSKQMGDTTVVVSTALEELSFLLYYHGCKMDFDEEYQIEENFPSLLGGAPCKGMRTFWIDEVDPENGSFRIASDAIVNTDQAIKQFIELIQSNLPEEDRRKPIDSSQIPIIMAQDQNDTYIHADTGWPLVVYYTRTTQVGENKSGQEISLEINIPEMKELVIFDLDGTLLNTIADLAISTNYALHRCGFPKHREEEYFHFVGNGITKLFERALPEECRSSDNVSRVRSYFLEYYSVHNTDYTRPYDKVEELLSVLNSHGVKIAVASNKYQAGTQKLIQYFFPGIDFVSVLGQRDGIPVKPAPDIVYEILNKSGVEAEKALYVGDSDVDMFTAKAAGVESVGVTWGFRSREELIEAGACHLVDSPIEILRLSLMEKRHDIKGILFNFSGTIDTEGSDWFDLIWKEYREIGIPITKSDYLAAHEFAEKEISEKGLIEPWFNFYFTLHTKLSLQIKYLISKGLLSDNRCTQKYAQQLATICYNMAIMYVRQNEKTLENLVKQYRLGIVAQSYGNLPAVLVDFGLASYFTDVIESSMVNLSKPDKEIFRLSVNALHIEPEETLCVSNSLNSDLLPAKDIGCKTAWLCQRTVPQAKRVSNYHIASLKELNNLLSMCILRAGSIYLRMKRKKPQTSRLWLSIKSIHFFMLRAFLDHAPAQFPEYFSMDWIQNLLFNDASVAHTVILYAFVIALGVALGKMKFFGISLGVTFVLFVGLIAGHFGFSAEKNILHFVQEFGLILFIYSIGLQVGPSFFSSFKKGGLTLNMLAVGIVILNIAVALTLYFIHQGEISMPMMVGILSGAVTNTPGLGAAQQTLSQLKFDGSISEVPEIALGYAAAYPLGVIGIIASMLVIRAIFKVKMEKESRQIEEENQSSQLVPHVVTYKVENKLIFGRTLDDLTKLIDRNFVVSRIKHNDEVIIPNSDTTLQEGDLLLVVLSLHDESALEAFIGRPVEMNWEAIPAPVVSRRILVTRPEFNGRKIGSLRLRMGYRLNATRVNRAGLDLLANPNLELQIGDRLTVVGRIEDINRLAEKLGNSTKRLHEPNMVTLFVGIFLGIILGSIPLAIPGMSVPMKLGLAGGPLVVAILLGRFGHKIHLVTYTSTGASLMLREIGICLFLASVGISAGGEFVNTIMSGGLIWVWWGFLITVIPLLIIGIIARAHYKINYCSIMGLLSGACTDPPALAYGNKVSGNDAPSVAYSTVYPLAMFLRVLSAQLLILLFYMKKLIISTGVPLLLCSTALWAQEKIPSTWTLQDCFEYARDHSITLQQNRLSVEESEVNTKEAKAQLFPSFDFSTSHNYNNYPMADGSRSGKNVYTGTYGIDASWTIFDGKRRNTIKANRIQEKQQQYAFKETLDNLQIEILTDYLQILYAEEAVNICKQTVEVSLRQVERSRELLAAGSISKSDLAQLEAQYSNDKYQLVTAEANRDQLKLELKQLLELDINQEMNLATPEIDESKVLVPLPDKSTVYTTALGFVPSIQSGKLELEVAELNIANAKAGYYPNLSLNAGIGSGHNTGNNGSFGTQMKQGFNESVGLTLSVPIYSRRSNKSAVERAKIQQKISQLDLKNQEKDLLNQIENVWLDASSAQSKYLAAKEQLNATKTSYELTEEQFYLGMKNTVEMLTAKNNWLSAQQEELQSRFMALLNLKLLDYYENKPLTLDMKSKKIIIATVSTIVAIAILWFCFGGKSKSANYIIETAQAVRGDVSEAVTATGTIEPVTQVEVGTQVSGIIDKLYADYNSIVTKGQLIAEMDKVTLQSELTSQQATYDGAKAEYEYQEKNFFRNKALHEKQLISDTEYEESKYNYAKAKSTFESSEANLAKAKRNLAYATITSPIDGVVISRAVEEGQTVAAGFETPTLFTIAADLTQMQVIADVDEADIGGVQEGQRVIFTVDAYPNDTFEGTVTQVRLEATEESNVVTYEVVISAHNPDLKLKPGLTANITIYTAERRNVVNILLKALRFVPDPPSGKKRHEPEDLPQQEISGNDSLKIVWVQDGQEWKPRKVVVGMDNSVNVEICSGLEAGETVAIDRKSNINATNRQLSEEKEESPFMPKPPGKKKMTTNEIIRLENIRRNFIVGSETVHALRGVNFTINSGEFVTIMGTSGSGKSTLLNILGCLDTPTSGEYYLDGISVRSMGKNERSVLRNRKIGFVFQSYNLLPKTTALENVELPLMYNSSISAKERHKLASKALDAVGLSERKNHKSNQMSGGQQQRVAIARALVNDPVIILADEATGNLDTRTSFEILVLFQELHARGRTIIFVTHNPELSAYSSRNIVLRDGKVISDTRNEKQASALEMLQKLPVETDMNLTNLTKIALKALNNNKLRCFLTMLGIIIGVASVITMLAIGQGSKRSIREQISEMGSNMIMIHPGNMERGGVRQDASSMQTLKLNDYKSISEQAEYVSACSPSVNSSGQFIYGANNYPSTIYGITEDYLDIRKISLEEGSMFTPQDVITSAKVCLIGKTITDNLFPNGESPIGKVIRFNKIPLKVIGTLTPKGYNSMGMDQDDMVLAPYTTVQKRILAITYLQGIYCSALSEELTPQATEEISEILRKNHKIKEGEDDDFEIRSQEELSSMLSSTTDMMTILLACIAGISLLVGGIGIMNIMYVSVTERTREIGLRMSIGARGIDILAQFLIEAVLISVTGGIIGVVFGVGASVIVNVLFKWPVYVQAYSVILSFFVCTITGIFFGWYPARKAANLDPIEAIRYEMASDKLHLSKKWNTVFIHLAAWSILFIFPLLFIERFGNINRMHNFSLIKFYIQPICIACIFYINYLWLIDKVLFRKKTIRFILYNLLLVVMANIAIYLVHRMVIPESILHQRPTPIPPPRPGFMQWQDSITLVLVVGLSAAIKVTQKWITTEKERKQLEQERTEAELKNLKNQLNPHFLFNTLNNIYSLIAISPERAQSAVLELSKLLRYVLYENTQPYVPMEKELEFNHNYIELMRLRLARHVQVDVNIPTGLCRGYKIAPLLFITLIENAFKHGTSASTRSFVKINMSEPSPGVIECDIENSSFPKNETDKSGSGIGLKNLSRQLELLYPGKYNLHAESDSHIYRSMLTIDLNMILKCCIIDDEPLAIELLESYVKKTPFLQLEASFTSAVQAIERISKGDIDLIFLDIQMPELDGMEFSRMIEGKSRVIFTTAFGQYAVDSYKVNAVDYLLKPFAYTDFLKAAQKALQWFELSSGTGEMHSPDKSYIFVKSDYKLKQIPLDKVLYIEGLKDYVKIYLEDEPHPILSLLSLKSLEEMLPDSRFIRVHRSFIVQGCKIKMIDRNRIVFGKEYIPISDTYKDSFAEFISRHTPLSNKMNEWNDNQWREFFGDHSLELRTDKWFTRRVLNRLPRKRWSIEAKISFVVSVLVIAICTVLCLIFAKEMIYNPCWTCAHTWLAYMGLSVACGLCVGQLGSFLRRIYDASMNKNEDIAWVTRCALFDDRRAFACLVDKYQVRLKRFFLNLTGGDPVLSDDLAQETFIKVYYNLRSYKGLSSFSTWIYRVAYNVFYDELRKSREWEDASVDEAANLLEQPPECVDRNIDVSRALSILRPEERTAITLFFVEDLAVAKIAEIMSISEGTVKSHLFRAKQKLGEYLKKNGYEMKKMFMMMLLSIVSWTGAVTATEATAPLKSNGPVAQQEAVVAADTLNGMTPSEAFQIRMKELEFERDRTLFQDEPDAEDIIDSLVPLFAIVSPFLIAFLIVFFYIYYRNKKVQSRYRVMEKAIESGRELPEGFFDEPESKRPSKFSTLNQGLVCTAVGIGSFIWCIGGAYELDEGFGALLVGLAAIFTLIGIGKLILYRVESRKEVRDTDEQTTEIEMEYRRHKRDETNRQKDSLKEGKGITQKGSTYFISELIKYLAMKQKEINKVEIRNLQKEDYDQLASSFTRVYADGSDVFWTPEQIDKLIRIFPEGQIVTVVDDKIVGCALSIIVNYNDVKNDHTYAQVTGNETFDTHTRKGNILYGIEVFIHPDYRGLRLARRMYEYRKELCEKLNLKAIMFGGRLPNYHKYADRMRPKEYIDKVRQREIFDPVLLFQLSNDFHVRKVMRNYLPNDEESKHFACLLQWDNIYYQEPTEEYISPKTTVRVGLVQWQMRSYKTLDDLFEQVEFFVDSVSGYQSDFVLFPEYFNAPLMARFNDASESQAIRGLARYTDEIRERFINLAIRYNINIITGSMPLIKEDGLLYNVGFLCRRDGTYEMYEKLHVTPDEMKCWGLSGGKAIRTFETDCAKIGVLICYDVEFPELSRIMASEGMQILFVPFLTDTQNAYSRVRVCAHARAIENECFVVIAGSVGNLPKVHNMDIQYAQSGVFTPCDFAFPTDGRRAEATPNTEMILISDVDLDLLNELHTYGSVRNLKDRRNDLYEVRMKKMVKIGLLSDTHAWWDDRYEKYFAECDEIWHAGDIGSVQVADRFEALKPFRAVYGNIDGQELRIRYPQHQRFSIENTDIWITHIGGYPGRYAREVTPEIYIHPPQLFISGHSHILKVLYDKTLHCLHINPGAAGMYGFHKKRTLVRFAIDKGEFKDLEVIELADNRMAIGPLSFDESGLFECLVFIPCTGFAYAFSKTENSMSAPKRLLAIINPISGTKDKEEIPALIREVIDPSKYRVECVFTQYAGHGAELTRRAVDESVDIVLSVGGDGTCNEIARELIDTSTALAIVPVGSGNGLARHLGISMDVRKALEIINDGQIVDLDYCTANDRPFFCTCGVGFDALVSLKFAQGKRRGKLSYVAKALTEYLKYKSETYQIEMPDGTVTEKAFLIACGNASQYGNNAYIAPHASMQDGKIDVTVLMPFTPFDTAALALLLFTKHIDQDSNIKSFTTESLTIKREKPGAIHLDGEPIEMGTRIDVRCFKGGLHALIPSGEPKRSIIEPFASVFWEFIETVRQELNIMDNKKLVFLKQLSTFVEDRSLWVEPNRKYDFRLSPSPPFTIFVEYRLRFDIVKFEIKFPIDFALTFHYICWYENRMRFGIAQTEIKFPFVSALTFHYICCLMNAFQNPLIRIIASIAVGLLLILYPNAALPTILLIIGILIGLPSLYALLVYLLSEDRNKLPFPVLSLVMLLFGCTLMLFPGWYIGITVYVLGGALVLIGVYQILYLLTLKKNLRSKAGWLSYLLPAIVLLIGIEILVNPFSATERVMVITFGAATLLYGITDLIYYIRLKMRYKILFLFITIGAVFQLAAQGRVKLTGRVYDSDNQPIELATVRVAGTTMGTMTDLKGEYQLSIPAGDSIVVIYSCLGYREERRQLLNLTKDVSLSVRLSKNAKMLNEVVVATHRRQTSTLQTIDTKDLKLMPDATGGSIEAMLTTFAGVNSSNELSSQYSVRGGNFDENIVYINGIEVYRPLTVRSGQQEGLSIINPDMVGAVGFSSGGFSAEYGDKMSSVLDIIYKHPEAFEGSVSASFLGATASVGQSTKKFSQLHGVRYKTNSTLLSSLDTKGEYEPSFFDYQTYLTYKFAPKWEASLLGNISINNYKFTPHERNTSFGTATDAKQFKVYFDGYEKDKFETYFGAFSLNFFPDKYTQWALMTSAFVTNELVTYDIAGQYWLDDLANGEDGESTENKGALGVGTYHEHARNRLRASVVATSLKGATKLGQNELKWGLTHQYEKIHDRVREWEMRDSAGYSLPHTGQSVEMIYNLFSRQDMESHRLSAYLQDTYRLRTLWGRFIFTGGLRASYWGFNKETLVSPRASISFIPAANEQITTRLAGGLYYQAPFYKELRDTVCDAANNYVVQLNRNIKSQRSIHVVLGGDYSFRALDRPFKFTAELYYKKLDHLIPYEVDNLRVWYSGQNEAKGYAAGLDMKLFGQFVPGVDSWLTFSLMKTQEEINGVKLPRPTDQRYSVGLYFQDYVPRFPKYKFSLRAIFADGLPVGSPRKGRQAGYFRAPAYKRVDIGASRILVGGEDKLLQKGVLRHLKSVWIGIDVFNLFDISNVNSYYWVTDITNAQYAVPNYLTRRQINLRLSIDFMKSLHDLLIHRRSIRKYTQEALSPEAVKTILEAGLLAPSSKRCTPWEFIAVEDKETLARLSECKTSGAKPIAGAALAIVVTADMTLTDTWIEDASIAAILMQLQAADLGLGSCWIQVRGRFGAMDEPAEDFVRETLGIPEEMGVLCILSIGHKDEERKPFDEEKMMWEKVHIGKWMVIPCIDMKIILIGAGNLATQLAVALQKKGMTPAYIYSRTRESAEQLSERLRDVPYSTDISRVPTDGDLYIFAVKDSALLDLVSRMPSNRGLWVHTAGSMDMEVFAPYTARYGVFYPMQTFSKERETDFDDIPIFVETNHTDDTERLQKLAGRLSTKVYEATSEQRKYLHLAAVFACNFSNHLYALCDRILSEHGLPFETMLPLIRETAAKVADMPPAQAQTGPAIRYDKNVIDKQMALLSDPTMRQIYDLMSRSIHETNKHMSRTDFDLSRIKAFAFDVDGVLSPDTIPLHPSGEPMRIVNIKDGYALQFAAKMGYPIAIITGGRTEAVRKRFEGLGLNHVYMGAAVKIEIFKKWLDECGLRPDEVMYMGDDIPDYEVMQIAGLPACPADAAPEIKQIARYISPFGGGQGCGRDIIEQILRAQGKWISDKTAFGWMLSHLKKYEILLASNSPRRRELLAGLDIDYRVTALPEVDESYPDTLSGEEIPLYISQEKAAAYRRFMKDNTLLITADTIVWLDGKVYGKPHDIADAKAMLQALSGKTHTVITGVTLTSLQKQISFAVSTEVTFAALGDDEIDYYVETYRPLDKAGAYGVQEWIGYIGVTGLKGSYYNVMGLPIQRLYTELKKFMKKFLWIAFLSFCFSGVAAESDWNADSVQVYFSRSVTPVIQKNWKDHKLILKTYRQFLKTCESVPDSVLKQCSWCFIDTYYNVACCESLMKRKKAAVDAFEKAIQYGYYDYAHAQKDTDLDNVRDDKRFQKAMERLREVGDFGYILRKSPGYDDAASTDSLSAFTYMNPNDRDLVRVRRYFNLDSIAGAGDEISKIKNLLAWVHNTIRHDGSSYNPEEKNAIALYEICKKEERGVNCRMMAQMLNECYLAMGFKSRYVTCLPKSYINDCHVINVVYSNTLDKWLWVDPTWNAYVMDDKGNLLSISEVRDRLKKGEFVTVNEDANWNHKTPCTNDYYLDYYMSKNLYYLQCSDCSGFNNETYVEGKRRPVYITLSPTGEPYDKRWSTSNESWFWASPYKMFILLNSEKNEPRSAAAVIGLFGLLPRSPSGSVELAPLGQSSPFFLRLPCDFTARMKSFISSLILTGALWVSIPMSAQRPMNERVHDKVATKEAPRIQFVGKKQGPNLFQSAAASVTADFSCQSAGSAVTVWEEDFDDGTDGWTITNAEDFSWTVKKITSTTDPSRDFSTYDPDDVQSLYIEGPYQSFKRGIAMATSGQIDVPANAMLKGYIGFTQNMDDYCRLQISVSADAFETSEILWNSADEDGEKPWRWHEFSVSLEKYSGQKIQIRFTYGPGKNDSFGTGGYMGDFAIDGLKITGVSTVEQVEAATGEVIAFADMSSGSPTAWQWSFPGGTPSISTDQNPRVFYTRDGVYDVTLTVSNADGSDTKTRTGFVKVTGSAPLAQILPPATFRFSETRLPMVAPLVGVQYRDNSTNYPTSWEWTFDGVDPEPYARVTSHEENPIVGYSYMHKQGVSLRVENEHGESNDTVEVSVEYSGLITNLEPGDRAATFDLEDRGTFPGTNKLNITAYAEKFSKPSRPILVFGAYVYFVSASAASITDQIADVGVHLYTSENGLPGKKLDSMWWRVFELETPSGSSLTATEFEFDPTVIDDEFFIVVDGIPEKNDSVDVSFAMADFRDHGNTAYMLKDGEWRDVSTYFPAGANHTSYMIMPSIVHSVMSPMPVDREPLVVGKAAGTVKYPFYSIYGYETPIRSDAEWCRVVGKPNGLTLDTLQISYDRLPDGIEERVATLTVSDSISTYDIKVTQNVNGVSSIEKVTEEKASIYPSVFNSEFIVRVPENTRSISVLDEGGREVYRQHVDSQARLVTVDASAWAPGTYFIRVVGKHEITVVKGVKRMKKITSVLFLFYCFSVGWAQTVPPCTLEITDAETFARDWTVIDVNSDVSANTWAYNDGNAMYTQDKSNAADDWLIAPAVTLEAGKAYKVSAYVKHSSTFGSDKQKIELKIGTAPTVEGLTTWLVYDESFQSRLFVEKSGTFSPAESGVFYVGLRCYSESYNGDLYFQKIVIEEAPVYPVQITDLSIVAGERGAMSATLSWTWPSSDHLGGALSNLLGAKIYRGTDLVATLDTATVGGKAGWIDSSIETAGNYTYKVVAYNTFGDSQGSATTVTSPWIGNDTPAAVTDLVALAEDATVSLSFTPPTVGKNGGYIDTGALTYEIGRTPGGVLSESFSGPFPYIDEVPELGSYVYTVVAMFDGKASVSVASNKVVAGGAKELPYSESFDTESSLDLFTILSANGDNSTWKYDSSKKMVQYWGGSDADEWLITPKLNLVAGKNYKLLFKTGLENAASEESYKDLSVTIGRAATAEAQSTRLFRDTIQSALMEEKEVVFSVSESGGYHIGFHCYGQTNWYAIFIDDLSVDETVVVPAVVSDLTVAPGEQGAMSATVAWTNPSLSAAGTQLPMLTKMELYRGETLIYTQEDPIKGGSEQVIDEDVPAPGKYEYRVIGYVEENAGEAAVVESAWIGADTPKSVTDVELTDVEGKPQVTFRAPAEGVNGGYIDVENLRYRIVRDPGSEMLTESLTDTVYVDSDDLSLALYRYTVTTLSGDMESESVTSNALVFGSALGLPYETSMDSADEMALWTIVDANNDTKSWVYDATEKEMKYTAYSAADDWLFTPPFEAKKGSHTLEFRARAEKYRYPESIEVTLGSDVLPGESQTVIASYPEINSTLSELYTVDFSVPSDGIWYIGLHATTRDPWGLYISSCSIISNVISGIDGLECMNEVYFDRSNHSLVFDKGGDIQIINAAGVTVVSCESESGRMDLSQLPAGLYIAHVVTEEGKTIQIKFIKMIADCKIIILYLHIDKIKFDYVKLNFRCFRLPVFRSGRIERLCIRDGISIVFEMICRFFYGAKIRKKGRDFIEQMYLFSLSDCLRPRFIRISGFSHLSQNADECCHIFLKGDDCYIFMNLYLFNPENDLAIAFGGENYTPPPAAQLIGKELSTLPLWYADDDTTIYIPDKLPSDFLHTLAPLNLKISTVTPDRLDGAQVKQIHVWGWNRDLIKRLRLAGIDKTLLPSARQCDTIRELSHRKFSAEIGKYLRNRIDYPFPELPVELHTADEIRSFTEQSDRKILKAPWSGSGRGLYWNLYGYDTALAQWSNGVLQKQGMLMGEPVYDKISDWAMEFHSDGFEVKFAGYSSFLTDRHGAYKENRLASDAVLELELTHAVGLEIITAVKESLIDFFTERIAPYYTGYFGVDMMAYRDKRGNTLLHPFVELNLRMNMGMVARKLADRFLPPETEGRYRVDYYPKPGELHNDHVARLKTNPPRITDGKLLHGYLALTPVSPHSRYRASIEIMLRDTAGGEYDTRLLLLLFLTSSSFQPPRPAGTPPIFPNGNTGGEDWKWRFSFGIRIHCALLPYVLHCKTMYFIGSSFFSNYFSIRFSIVKANRCALFFSFFVQHQKAEFRHKQINLLRPSAYIIFVDMKETSALIDKACRNLNIDSLNGMQKQMLETATRPNDIILLSPTGSGKTLAFLLPVLSRISPKIAGVQALVIVPSRELALQIDNVLRKIAAGIKIVCCYGGHSVREESKSLAVAPALIVGTPGRIADHIRRGRIVLETLDTLVLDEFDKCLALGFQDEMQEIIAPLKNVKKKILTSATDSESLPAFTALKKPIKLNFLGSRKDSETTPTDRLSLYRIDSPIKDKLETLLALLHNLKPGLTLIFCNQRESVDRVRQFLTDRGIIAEAFHGGMEQADRERALCKFRNHSSYICISTDLAARGLDIPEVKYIVHYHLPVDFESFTHRNGRTARMHAEGEAFIILGPTEQMPEYATEATDFRIDPKADFLQTPPMATFHFAAGKKEKISKGDIVGFLTQKGKLAADEIGLIEIKDHYSYVAVTRDIAHETLTRLKNEKIKGKKVKISFGYMEVLYEDNHLIIVNKNCSEIVQGDKTGDTPLSEMLKAWLKEKYNKPGNVFVGVTHRLDRPVSGLVVFAKTSKALARLNDMFRNGEVKKSYWAIVKRAPEKESDELVHYLVRNEKSNKSVAYDREKPGAKRAVLDYKILARGDRYTLLEVDLKTGRHHQIRCQLAKIGSPIKGDLKYGAERSNPDGGISLHARHIEFVHPVSKELVSVTAPVPSDNLWQAFEKMVEGKMIKKALLLAGILVVFPTTKAHPATDNDTTEVVYADTTGIDIDSIEASIDHIELDEVTVEASAWVRKADRNLLFPNAQQIKQSKNGLQLLQKLQIPGIVINPTDNSISLTDKSELSLRINGRPVTEKEIQGISPEQIIRVEYIDNPGIRYGEAGAVLDFIIKTPTSGGSFMGNFTPSLNRGWGQYWTSIKVNTGKSEFSYSGWFAPRWNLEMGRSNTERYELADGSRYVRTEQSQKGSGFEAWHNGHTLNYNFLDPQKQMFNASLNLNNNNYKNKYKGILTDERLGGIENNMYDRTEYISLHPSLNLYYQNNLKKDQLIMANLVTSYETSHSHRLYNENDLATDAPMVNIDNLIKGKTFSVLGEVDYEKTWKNSRFTAGIRHTQSWIQNKYVEQNTIDRMNQGNSYIFGEYWLRLGNHFDGSVGLGYSLYHYAPQNRQSHTYSIWRPRFTARYTIDDYSSLRFNFVRMGSVITLDMLSPVVQDIDGIQQSTGNPDVKPYATYKYELQYQYNRGIFYGKLGAFYTHAPGAIMPEKYWVGDKILSRVDNQKNAEELRFYLNTRINVIPGWLTLSAAPGWHKYWMRGNTYTHTYNNFFIDASIDISHWGFTLNGILQTNFNRFWGETLTGGENVHGIKLSYAYKDWNFGIMVLDPFINNYKVKSENWNRYAGYYRETTTNMIKQLLTLDISWNINWGRKHEAGQQRINNSINSGSVNAAGKMSCPCIMKKRVMKLLEGKVAVITGAARGIGKAIALKFASEGADIAFTDLVIDENGKATEKEIAAFGVRAKGYASNAANFEEAHKVVEEIVKDFGRIDVLVNNAGITRDGLMMRMTEQQWDMVLTVNLKSAFNFIHAVTPIMMKQKCGSIINMASVVGVSGNAGQCNYSASKAGMIGLAKSIAKELGSRGVRANAIAPGFIITDMTAALSDEVKAEWAKQIPLRRGGTPEDVANVATFLASDLSSYVTGQVIHCCGGMNMMVRTRELLIDVARQLFARQGVAATTMNDIAEASGKGRRTIYTYFKNKNEIYWAVVEAESKHLYARLEGLTNRDLPPEEKLLNYINIRLEAVKEAVVRNGTLRAEFFRDIWKVEKARRSIDLREVALLRSILSEGVEQGVFHIPNVTATASVLHYALRGLDVPYIRNNFSESGIDRSRLKDYILDFILYGIKRMLKMQISWYEGKTGCILWYFMIKMCNFAQVLYRCADRMGEDCPNEASSADPDGDCGDKPKSPITAAALLGSFFSLLRKINEMIDTRFETTIDLRGEIENYRQVALIKYYKILLELDPRRDRLTMLAVIRCIDKLERHSQERKRSRNDKKKMLAEGTLAWHYQKRNQLFRKAGLYDIESTQFLVDHEEIFDTHEEREERERFEACRREALRRKTETHEAEEKESVQPASAHEADKDPQEDYTTAGSEIPAHTPQPSSPLSGSIWCGTPAGNPIGEPAPGFHQSSFDCNRREMNLIPSFSLSISMSRNWKSPFSPTIPRNITSHFLISSVFCMARSDGGVNKNSSPNGSFFSPLKRISESPLTKRLKYGKKFHSIMKIQKNRAIYIGLLIIVWACAYVYIFNEKIDINGDNCRYYTFASSLASGQGYADISAPTPHPTNAFPPGYPLLMTPLRFFTDSIIAQKILNGLFLLGGALLLFFFMIKRKIPESLALVGACAAILSDRVLHFSTMMMSEMSCFFVSTAAIFLLANMKKEKPFYKDLSFYGMLVMVILCYHIRTQGVALFAAVVLFFLCTKKWKEAASTVAGFIIGCLPWIWRNKSLGIGQSRYFESIAQVNPWRPEDGSLDLSGIIDRFFETLGMLVSKALPNSVIPYFKVNYSAEVSAGFFMWIIAILLIFLIIRGFWAFGKYRWVLIGYTVFTFGLVSIFSTPSENRYITTLIPFMNMGLLVGIYAVATDTIHRFKLKYTFSPWVLSLLLLTGIGNIQELHAMNKMPFPPAYQNFFRLGLVLKEHVSPETVVASRKGELLYMFSGTRVAGYAYSQDDRAVIQKMLDDGVEYVILDQLGYSSTPRYLYPAIQKNDDLFFVASHVPNPDTYLLKFDREAAKKKLSQSQRQDGKNTLPMNTIDKNKKQAVIAGAGPAGLTGAYELLKHTDIHPVVFEESGDIGGISKTVRYQGNRMDIGGHRFFSKSQRVTEWWDEIMPLQGAPSLDDRLLGTTGKEFAPKGPDPEKTDRVMLVRNRISRIFYLHKFFDYPISLKLKTFTNMGLFRTIEAGCGYVWSVFFKKPETSLENFYINRFGKPLYRMFFEDYTEKVWGVHPSKLGADWGAQRVKGLSVFAILKDMLKKSFSKKENLKEVETSLIEQFVYPKLGPGQLWETVAGEVSEKGGEVITETPVKEIHIERNRVTSVTVETPSGERREVPCDYFLSSLPLKDLIRSIRGIDVPDDVKRIAEELPYRDFITVGLLMKKLSIKNRTKIKTFADRIPDTWIYIQERDVRIGRLQIFNNWSPYLVKDYENTIWIGLEYFCTEGDDFWEMPDKDFTQMAIGELAQIGIIDPDDVLDSVRIKVKKAYPSYFGSYYELDKVKDFLNKIENLWCIGRNGQHRYNNMDHSMMTAMVAVDHIATGNNDKSEVWSVNTEEEYHESKMNPTDKFKKIFYGASDNLLIQFVRYFFVGGFAFIVDFGLLYILTEYAGLHYLLSATLSFIAGLVVNYIISCIWVFNNSKFRNRIVEFLFFAAIGVVGLGFNDLLIWLFTDCIGTHYMFSKIVAAAMVYLWNFFARKYLVFKMRKNWIWGLSLLLIGGMASCKSSQSAYKAAYEKAQEKKIEEPVTTGTTPVAEQPVVTTPSTTTTTAPIREQSEKINAVDGNDALLKSYNVIVGSFRQRLNAQSLCERLRADGYPAVLAQNAQGMYRVVACSFDDRATAVQAREGLQAKYPQFTDAWFLINKMKRVLFIDRDGTLVVEPPVDKQVDSLEKLEFMPKVFQSLAYVATRLDFEWVMVTNQDGMGTPSFPAENFWTVQRKIIQAFANEGIRFDEVCVDSSFPEENLPTRKPGTAMLSRYQSGEYDLEHSYVIGDRMTDVQLAANLGCKAIYFALPERGVAELEAEGLSSVCEAVTDDWWKIAEILCAGTRRVTIDRRTSETDICVTLNLDGTGRTEVHTGLGFFDHMLDQLGRHAGVDLSVFVTGDLQVDEHHTIEDTAIALGEAFARALGDKRGIGRYGFSLPMDDCLCRVALDFGGRPWLVWNATFHREKIGDMPTEMFYHFFKSFSDAARMNLNIQAEGTNEHHKIEGIFKALARALRMAVKRDITDRELPSTKGVLMKKIEQWVRPNIRQLKPYSSARNEFSGEASVWLDANEIPFNPPYNRYPDPLQNDLKEKLAKQRGVMPENIFLGVGSDEAIDLLYRIFCEPGRDNAVSITPTYGMYKVCADINGVEYREVLLKKDFSLDCDAILQTIDTHSRLLFLCSPNNPTGNVFPAIEIERLITAFDGIVVVDEAYIDFSSRPSWIRRLNEFHNLVVLQTFSKAWGSAGVRLGMAFASPDIIGYYNQVKYPYNISALVQRYAMEMLDRENEVRRWVDEILSVRSRFVERLSGIPMVKTVYPSDANFVLVKMEDAEKIYLRLVTDGIVVRNRSKVALCGDCLRITIGTDREMKVLLETLKSYSMTVTVWKYPKWDEWKSIMARPQMDLISLSRTVSDILESVRCEGDDALRRYEKQFDRVVLDALQVTPAEMEEGVAAVPESLKKAIRQAIDNIRKFHASQAIEVKKVETSPGVWCWQKPVGIEKVGLYVPGGTAPLFSTVLMLAVPARLAGCHEIVMCTPPGKEGKIAPAILYAARETGIDRIFKLGGVQAIGAMAFGTESVPQVYKIFGPGNRYVMAAKQQVSVQGVAIDMPAGPSEVMIVADSGADVRFLAADFLSQAEHGADSQSILLTTDRRIADLFPAEIERQLDRLPRREWVEKSLSHSSVVLLEREADLADFVNAYAPEHLVVHRADAEEWASAIVNAGSVFLGYYTPESAGDYASGTNHTLPTSGYAKSYSGVNLDSFTRKITFQQISSEGLKNLGPVIEEMAEAERLEAHKEAVTVRLQSIHSMLRIAIQSKGRLYEESMALLEEAGIRIPGGKRTLLVPARNFPVEVLFLRDDDIPESVASGVADVGIVGLNEVMEKRCPVGILKKLGFGKCRLSLAIPQNIDYQDRNWFSGKKIATSYPGILSDYLHKNGIVSDIHVITGSVEIAPGIRLADAIFDIVSSGSTLVSNRLKEVETVVESEAVLIGTDSISSEKRGILDELLFRFDSVQAADDKKYILMNVPQKKLNDVLSVLPGIKSPTVMPLADKEWCSVHTVLDEKCFWEIINRLKTAGAEGILVLDIEKMILMELLIVIIVLALLFDFINGFHDAANSIATIVSTKVLTPFQAVLWAAFFNFVAFFIAKYIIGGFGIANTVSKTVVEEFITLPIILSGVIAAIAWNLITWWKGIPSSSSHTLIGGFAGAAIMASGFGAIQLNIILKIAAFIFLAPFIGMVVAFGFTILVLHICRRVQPHKAEVWFKKLQLVSSAMFSIGHGLNDSQKVMGIIAAAMIAAHSMGLGMGINSIADLPDWVAFACFTAISLGTMSGGWKIVKTMGTKITKVTPLEGVVAETAGAFTLYLTEILKIPVSTTHTITGAIIGVGATKRLSAVRWGVTKSLLVAWILTIPVSALLAAGIYMVVTFFLGMKNSFFSRFTPKEPKFFPLLKQLSEVLVSSSAVLVESMQHDKPEERSSYYKKIKDLEREGDRLAHLIFDELGTTFITPFDREDIQALASHMDDVIDGINSCAKRIAIYNPRPIGDSGKELSLLVQKEADYICKAMDELDTFRKNPATLREYCSKLHDIENQADDVYELFITKLFEEEKDCIEIIKIKEIMQILEKTTDSAEYVGKILRTLIVKYAMIIEQTEDGIPTLYLPRMDEHYHSTKGALAEARHVYIDSALRASGKKEINVLEIGFGTGLNTFLTFLESQEKGLRINYTTFELYPLSPDITEKLNYPALIAPSSESIFALLHQCEWNQKIAISPLFTLYKSHADLTRTSLEGIYDVVYFDAFAPEKQPEMWDEKIFREIFSHLSPGGILSTYCAKGEIRRRLQSVGFTVERLPGPPNGKREILRASKRMNFFDEMAGVWNKTCRYDTGRIEKVLSVLQLKQGDTVLDIGTGTGVMIPFIREQVGHYAPIVAVDSSEKMLREASLRFPNAGVRFVRADVERDRLGGRFNAILLYSVFPHFRYPVDTIARLVTDNLYCGGRLLIAHSQSREQLNEMHKRISDKVFARDLLPVAEQVAQFTEIGLSVASFDETDEYYYILLQRVGRKLSASVADAIYMCTTCGCGHQEMSHEEMHCLGIAHGHGKTVDIAVEQDILSENNRIAGQNRNIWNTTGCWAINLVSSPGSGKTTLLESTIKQLGKRDFHKIAVIEGDQHTDNDAGRIRNLGIPAIQINTHNGCHLDARMVSSAFDELAVKDTLLFIENVGNLVCPAMFDLGENLRVVLLSVTEGDDKPLKYPYMFAGADICIINKIDLLPYVDSDVARLKDNALKINPQLCFFEISATRGMGMDEWCEYLLACFERKEEKMHELSLACSVVELVEKELALHGGGSVRCIEITIGDLSGVDNDAFLFSLNMVLERSAFAGARVMVDRVKPLAVCGVCGESFSPVSLYASCPKCGSYKTRLVSGQEFRLTSLIVETDKMNQYHIHVRGLVQGVGFRPYVYRLATEMGLRGYVDNSNDGVFIVLQSTCIQKEKFLKALIKSAPEVASIEHIETVQRRVSKKYESFDIAPSRSSGDEITRISPDIAICSDCLKDRKHQLHRMGYPFINCTHCGPRFSIIEKLPYDRAVTTMSSFGMCDTCREEYADVNDRRFHAQPIACNECGPHYTLRDSEGNEDTVYIRIVSRISDVLSNGGVVALKSLGGYNLICDADNEQAVARIRELKGRYAKPLAVMYRDEREVMVDLNLSDEERKALNSWRRPIVLAEEKVHNAPWLNEGYRSLGVLLPYMAIHYDLFTEAPELRRIVVTSGNMGGRPIVIADEEAHDLFDSKVDSVVSYNRDIYNRVDDSVVQEYDGVCRPIRRSRGYTPEPLRNVQATEGILAVGAEQVSCFAIGKKEDILLGQHIGELSCRENLSFFEESISHFSRMFRFEPRCVVCDLHPDYFATAWGERCAAERHIPVYRVQHHHAHAVAVMAEYALTGDVLALCLDGTGYGDDCTIWGGELIRCSRTEYRRLSHHLYLPMPGGDIAAREPWRMAVSLLYSLYGENMPLPDNFVKRVGEDRIKLVSRMIARRINTPLSSGAGRLFDAVASLLGIADFNRYRSEAPQKLEQVADRSILKIYSFDKDNPLDFSWLVKAVLNDLQNGVPRSEIASAFHRTYAAMWCVELAKQAVRQKLSRVVLCGGVFQNKLLVDILMPMLRQLGLQPYLPASVPCNDAGIAVGQMAVTAAWIEQSMNHNDKRHARVVVGLMFIIRTKTITQIMCLAIPGEILDIDTSCSLRMATVDFGGIHKSICIQYVDAEPGDFILAHAGMAITRLDSEEAEATLEDFRILADNLNPDNHVVMWYEKQFRDNGNLTTLLQAIRQIATFPIRIMEVCGGQTYALSRYRIEELLPNTVQMIHGPGCPVCVTHEDTISQAIEIARNPQTIFCTFGDMVRVPGTKGSLQQLKAEGKDIRIVYSPLDTLRIASENPEKQVVFFAIGFETTTPLYTLLLQEIVSRKITNLSLLTSLFTIPAAISFLAQDPECKIDGLLAAGHVCSITGLREYDALAEKLKLPIAVTGFEPADLLYGIYQVIRLKAQGIDRTINAYRRAVPTQGNRMARQKTERFFTPYDAYWRGLGKIPVSGLRLRPEYEQYEARNRFLCKVKPGIQASVCRAGEIMKGKISPEKCPLFGNRCTPDTPLGASMVSSEGACSAFYRYRTNMNLPDCPTLTQKYDRIVMAHGGGGRMTSRLIEKIFYPAFQNKWLEQAHDGATLNLPSARIAITTDSFVVDPLFFPGGNIGDLAINGTVNDLLCCGATPLYLSAGFILEEGLPIETLKQIVQTMRKAAGKAGVSIVTGDTKVVEHGKCDKIFINTTGVGIVPENIDIGLHRIKKGDAVIVTGDIGNHGICILSTRDSLGFETSIQSDTAALTQIVSNLLAGVPDVHILRDPTRGGLSSTLNEIAEGANVTIAIDENELPISSSVNAACDLLGLDPLYVANEGIMLVFLPDEYAERALQIIRSDIHGKNARIIGHVTEDRHPEVILKLSLGQTRILDMLSGEQLPRICMEKEQTFYQELKAKGYTRRQFLKFCGIMGAMLGLHQTGIAQVVNALQTKPRKPVLWFHFQECTCCSESFLRSSHPLVGQILLEMISLDYSDTLMAASGFQAEEVRTRSMKENWGKYIMIVEGSIPLGNPGYCTIAGHSAKQVFDEAAHGASAIIAWGNCASSGCIQGAYPNPTDTKPVHKIISGKPVINVQGCPPIADVMAGVITYILTFDRLPELDNMGRPVSFYGRRIHDTCYRRPAYDAGLFVEAFDDENAKKGYCLYKMGCKGPNTFNSCAVIKWNEGVSYPIQSGHGCIGCAEPGFWDAEPMYHHLPGIKGFGIEATADQIGLGLTAVAAAGVTAHAIVTNIQKRKLIKNQMDNDDINKEEFAVEEHQIEREEKRLDQKAHKLEKDKDNRMTKRIVVDPITRIEGHLRMEADIENGVITDAFSTGTMIRGIEIIVKDRDPRDVWAYVGRVCGVCTSIHSLCSVRAVEDALHIVIPPNAEQVRNLMQSAVTIQDHVTHFYQLQALDWVDVMSALNADPRKAAEVAQSLSEWPKNSIGYFVEIQKKIRTFIETSKFSIFSNGYWGHPAYKLPPEVNLVALAHYLEALEVQKEIVKVQTIFGGKNPHPNFLVGGMACAVNINDPNALNMERLNYVAQIIERTQTFVRQVYLPDVLAILSYYPEWTKIGGGLHNYIAYGDYPMGNYGELSTYKSPRGIVVGRDLSKVVEFDPWAMDGLLEFVNNSWYSYTQGKDVGLHPSVGETHLNYTGATPPYEYLDRDQPYSWIKTPRYKGMPMETGPLARNIVGHASGNEAYKEITQRCLKQLNVPYEAMYSTAGRTLARAIEANLLADWQTEFYTALLQNIKNGDYRMFNGIKWEPDTWPEAAQGVGLTEAPRGALAHYVGIKDKKVFNYQMVVPTTWNASPRDTKGQHSAFEASLIGTPVIDPRLPLEIIRTIHSFDPCMACAVHLYDENGEHIHRCEMLMISRKKSLREVYVWELPVRIFHWVNATAIVALCVTGYIIGNPPAIQHATPPEANYWFGWVRFIHFAAAFVFILNFIVRLYWAFAGNSFARWNNYLPLTRKQWRSIFDTTKVDVLLLSPKPVYDIGHNSLAAFTYFGVFVLFIIQTVTGLAMFCVSTNNVMEPFFTWVLLKCGGFFVVRQIHHIAMWAFILFTIAHIYLVFYHDYIERNGIASSIIGGWKFVREDLAEEYETEQKQQQQLQKQKDGIANETTEKMESQTKQPKNNPTPDKILVLGIGNLVLNDEGIGIHVVNALSEMEIPQGVDVLDGGTGGLALLETLQSYRQLILVDAALDNNPVGTIRRLSPQYSKDYPPLLSAHEIGLKEMIDAMLLLGQAPRIELLAISVRNCHHLGMQLSPEARKAIPQVLQLIFEIINDLQHDRCLMGAEMLPNYSIFSIGDSKIDTFLEAVLNLFRDRLRPMLKQIGVRDMQSIAGYMKTKNSFLLILCLLLFSSLHAQNEPVKILAIGNSFADDGIEYLDEIAISAGKHIIVANTYIGGCSIQRHLDNARHDKHDYKYRKNIDGKYTEEKRKSLLEALKDEEWDYIVFQQASSFAGQYSSYFPELTELMEYVKANATNPNVKYAMQQTWAYAKDSNHPGFFRYGKDQKAMYEDVVFSYDKAAQKQNISIVIPTGTAIQNGRSSSLGDTFCRDGYHLDLKYGRYTAACAWFETFFGESPIGITYRPEGVTDEQASIAQHAAHFAILRPTSVTDMSNFMIQLIKNITILFFLLLSLSVSACSKDDFTPAYPKSEGVTRLVSYNVGVFAKYAKSGYKMTARMMKELDADAVCMQELDSCTTRTKHVFQVKRFAELMGWEYVYAKAMPYQGGYYGTGLACKDKILKKFSIALPQGGEPRTVAVAELEDYIIASTHLDLQKETQLEEVEVINKTFTELYKDCPKPIFLLGDMNAEPNSETIQMLKTCWDILSVEGNTYSSHNPNKCIDFILQLKNGVKCEVIESKVPTVFHTGDVTQASDHLPIYVDVKIPKNMRRMTLYILLGIIVSITIAGIAFLHQPSFGRLPKGERLERIKRSPNYREGEFRNIDTTILMTSHKSRLSGIWSFLFRKVEGLRPDEPIPAIKTALRKIPLEENALVWFGHSSYLLQVDEKRILVDPVFCMASPVSFVNKPFRGTEIYSPDDMPDIDYLVISHDHWDHLDYHTVKQLKGRIGKVVCPLGVGEHFEHWGFDKSRIIELDWKESATLSQQFIIHCLPSRHFSGRGLTPNQTLWASFLLETPDRKIFIGGDGGYGSHLKQIGERFPDIDLAILENGQYNEDWKYIHTMPSLLEQTIKDLGVHRVLTVHHSKYALARHRWDEPLKNARNLSRNDSLTILMPVIGEVVNLFMSLIIPPKYKLKLLPETTEMAIKMLKDAFQERLSKTLNLRRVTAPLFVLSGTGLNDDLNGSERAVSFPIADMGGRQAEVVHSLAKWKRVKLGAYDIAPGFGLYTDMNAIRTHEELDNLHSLYVDQWDWEKTITREDRNVEYLKKTVKSIYKVIKECESLIYAEFPHITPTLPDEITFIHTEELLQEYPRLSPKEREAAVARRYGAVFLIGIGQQLSDGTRHDGRAPDYDDWTTPNSDGYLGLNGDIIFWDTVLGTPVELSSMGIRVDKEALLRQLDICGCPERAQLSFHRALLNDELPLSIGGGIGQSRFSMFLLQKAHIGEVQASIWPEEQIAECARHNIHLLMYIYKQFILSFGFRKLKLFDNLFYKSYNIVRLTSQFDIIMDTNRLGIMPEPKLSKESEHNLVFKPITLDSLSEIEPFLHRQCYRTCDFSIGGIYMWVDYFGYEYCISQDTLFIKGGEEDNLQNTAFAVPVGKLNLQESLPLLKEYCRRHNVPFILSAVPEPAALEIQQLYGCPITELPDWGDYLYNAVDLATLVGHRFNKKRNRVNKFKSTYPDYRYEMITSQNLPEITAFFETYKQEYQKNSLLFTYEESKVVQVLHEYEKLKFEGGALRVSGQIVAFSIGEVIGDTLIVHIEKARKEVAGVYEAINQFYSAQMVEKHPEVKYINREDDAGDAGLREAKLSYNPETILKKYNIALNEYALMKKLLWAILATAIIAGANPETCYAKKKSKKNDKKEQVKDTTAKESKYEKLIKGAKTQKGMFTLHITNDNKLLVEVPDSLMNRTFLLSSRVAATTDPKIFVAGEMTTNPFMIRFSKNEQSLFMHLVQHRNIIDENDPIAASFDKNFGDPIIKAFKISAKNGKDVVVDMSDFFKGNEKIISPMPTPTPGSSSKIKTGTYTAANSYILGAKSFPQNSEIRSVLSFTGDNNCTVTMHRSLVLLPERPMTPRIYDRRVGFFSSGKNIYSSDKDRIDYTKYVHRWRLEPKEEDREAYFRGELVEPAKPIVFYVDSAFPDKWRDIVKQGVEDWNTAFEAAGFKNAIIARDYPKDDPDFDPDDMRYSCVKYAVTDIANAMGPSYVDPRSGEILTADVIWYHNVISLVHNWRFAQTGAVDKRVRKETFDNDVMRESLRYVASHEIGHTLGLMHNMGASYSFPIDSLRSPSFTQKYGTTPSIMDYARNNFVAQPGDYERGVRLTPPILGVYDIYAINWGYRLIPDAKTPKDEIPTLDKWIEEKKDDPMYTFGAQQFPGAYDPTDQTEDLGNDHFRAGEMAVSNLKIIMKNFEKWLFDEGKDFTTIQEQYAAIVQQYNRHLRHVTPYIGGVLFKEVRQGENELPYTYLDKATQKKAMRWILNQVRTYRDWLMPADLMQRINAPTNYASSVHRYIPAYLVNPTVLFRIQEGGIIDPVKNYTLDSYLNDLIAEVFKTTYQGRKLNNIERDLQNETINQFIRYSSLKPASSGIRNLDFTDDIDLESEAFPCSHALCRHHDSEEQSFTRINMGPALSSADMAPYMTGALKKVLALYKQKRAASADSATRNFYDYQIITIEKLFNNMKEFILTQEETERTVLVGLITNTQNEAKANEYLDELAFLAETAGALPVKKFLQRLDTPNSRTFVGSGKLSEIKAYIEENEIGMVIFDDDLSSKQVQNIERELQVKILDRTSLILDIFAKRAQTANAKRQVELAQYQYLLPRLTRLWTHLERQRGGIGMRGPGETQIETDRRIILDKISHLKEELKSIDRQKSIQRKNRGKLVRVALVGYTNVGKSTLMNLLSKSEVFAENKLFATLDTTVRKVIVDNLPFLLSDTVGFIRKLPTHLVDSFKSTLDEVREADLLLHIVDISHPAFEEQIEVVNKTLQEVCDSTDKPMILVFNKIDAFSYVEKAADDLTPKTRENITLDEWKETWMGKMHDNCIFISAKEKKNIDELKTLLYQRVKEIHTTRFPYNDFLFQHYDEITTDEMKNYRKLNIAEINQLTTQFCTAENWSKINVVEGFSPDHITHTRFSGEIELGIFEKEMELPGGLKKKTGLHHVTLHNCSIGNNSLIENIPNYIANYRIGSDCFIQNVNLILTEGESCFGNNTEVSVLNETGGREVPIYNRLSAQLAYIIAMYRHRPDLIARLREMIEAYSLAQKSCYGEIGNGVHIVNTGTIRNVCIGDYCQIDGTSRLENGSINSNREAPVYIGPNVTAEDFIVSSGAHISDGVVMSRCFIGQACHLTHLFSAHDSLFFSNCQSENGEACAIFAGPYTVTMHKSSLLIAGMFSFLNAGSGSNQSNHMYKLGPIHQGVVERGSKTTSDSYILWPAKVGAFSLIMGRHVNHPDTSGMPFSYLIEHGNRSYLVPGANLKSVGTIRDAQKWPKRDKRTDPDKLDCINFNLLSPYTIQKMLQGIDTLQGLKQTSGETSECYSFQSTTIKNSSLNKGIDLYTLAVHKFMGNSIIKRLEGAPFSDLNDLHDRLKLTDSLGEGEWIDLSGLIVPKQAVKDEIDRIVGNPDSTLEETESFFQAMHRRYYDMEWTWVCSIMPRWYGKTVDRLSPGDIIRIVRQWNEAVVSLDRMLYDDARKEFSMISRIGFGVDGSTRQRDFDFEQVRGEFENDAFVKMVCKHIEDKTALGNELIDRLEALITSISQHMYFFCSWVMDWQNDILEKIKILFRGIGQVMFQNNAWSGVLMLAGIACNSLYMAGLALLGTVVSTSTARIAGYSCEDIRNGLYGFNGTLVGIAVGVFMNISVWAFMLLIIGAALSTWVMRLFQRQRFVPGYTAPFILVTWLLLLLERTVFPSLELSSDSVAVQEPVNIDFFQVFCLHIGQVMFQGGTVLSGLFFLVGIWINSRLNGLYAMWGAVLPLGAALFPDMGILGAEAGLLGYNGVLCAIALGTASLKGFGEATAAVLLSTVLQIAGMRIGITTLTAPFVLATWTVVLLRKVWMRKLLSVIIVYLVGWIPMFPCTSAVVSGRVTPDGRPLLWKHRDASDLNNRIVHFEAEGGKLEFVGLVNGVDTMANEVWAGYNTSGFAIMNTASYNLKNDTSSLSDREGVVMKQVLGECRTVEDFARLLDSLPRPIGVEANFGVVDALGGAAYFEVNSYEVFRYDVKDSPDGYLLRTNYSVSGRPNEGYGYIRYDNAARLFSRAASERSITPEWITGVCSRSFYHILLGRDFTTDAWVVDQDFIPRRSTSASVVIEGVKPEESPVFTTMWTILGYPPCSVVLPVWIGCEYGVPTLLQGAEDSVRSPLCEWSNRLKNKVFSLERGSGPHYLHMALLYNPEGNGYAQRLLLLEKEIYAESRIVLDEVRRKGEWNNEHVGGLLDIVQQKIVTLFGQILKMQIAKEHIRQNILNAALPLFYAKGYSKVTIREIADDSHVGLSNIYNYYNSKEDIFRELVQPVINDFEIMLDKHHGKSGSDIMEMYTEHYLRAVIAEYISLIKKYRNLLFLLLFRSQGTSLENYKRDFADRSTEVVKEYFRNMKIKHPELNINISEFTIHLHTVWMFTMLEELIMHKKVSDEIEQIITEYMIFSTTGWRELMKGMKRKYEFKNIVAETLLIPLYMRAKESRRKDAILKDKMAEQLIACIEYDYSKFDGAKLSEVGCVVRGRYFDDAVRRFIDNHSRPIVVNVGCGLDTRCQRIHRENDPTKYYELDLPEVISLRRELIPEPEYDTYISSSLLETKWLECLKTQHPDCDFIFIIEGVLMYFYEEQVKAVLHNIASHFSGGEVQKRSTINSKTQFTMTPNKKKEGLARLFQIAGERKGLLILSGILSAISALCMLVPYWSIYEILNELLSKAGNLGSIDSDLLIYWGWIAFGGLIIGLILLYASLMASHVAAFRILYGLRVKLSEHIGKLSLGFLSDTSTGAIKKTIEQNIEKIESFIAHTIPDMVNVAVTVIFMFVIFFSLNGWLAAICLACIVLSIGLQYINFMGKTAKTFTANYFDTQERMSASAVQYVRGIPVVKIFGQSVKSFRQFHDEIQGYKKWALKVCDTYEPGMITFTVLLNSIVSLIIPVGLLLISNQPHNIALAAVWLFFIIMGPGVTSPVYKLMFLGGGTREIDEGVKRIDRILDEKPVPETTLPQTPQSYDIEFRDVSFSYESKEQVTRTEALRHISFKASQGEITALVGPSGSGKSTVASLIPRFWDVGEGGIYIGGVDVRNIKTEGLMNLISFVFQDTFLFYDTLYENIAVGSPNATREQVEAATRAAQCHEFISNLPDGYDTRIGDKGVFLSGGEAQRICVARAILKNAPILVLDEATAFADPENEYKMQQALQHLIKNKTVIIIAHRLSSIVSAQQIVVLKEGSIAQIGTHQKLSSIPGVYRQMWEAYTDAFQWELKTEYKAMKKKNIINSILQNTRMPEGFFGRIILRGMNKGHASLSRWGLSQIEWKSDWTILDIGCGGGANLKRMADFCPQGKIYGIDISSESVKFARKEIKKLLNTRCFISQGNVMNLPYEKGTFDLITAFETVYFWGNLQKTFNEVHRVLKNGGLFLICCEASDPSDETWTSRIDGMVVHSAQDLESCLARCGFSNITTHRRNKENICVIAQKIQMNAIQNITIGQPDRLKKPVGYTILSNLVNIIPFCLSIEAIDVIFRAFDGNGTPLDTTRLWTISGILVIYVAVMVAAERASYRANFRKAYAMSADGRIALAEHLRKLSLGFLSRRDPGDLSSMIITDFTMAETGISHHLPQLMGALVMPVLAFLSLLWINWRMSVAMFIALPVAILILWLSTKLQQRLSSKQIEAKINAGNRMEEYLQGIRVMKAYNLLGDRFVRLRKAFSDLRKACIRQEALLGPFIMLSITIVRAGLTLMILCGTYLLIGGELLLTTFVLFLVVGSRVFDPLTSALTNFAEFRYFSIAGGRILNLMKEPEMKGDRPAPNGGDIEFHNVSFSYQDKKVLHHINLTLKQGSLTALVGPSGSGKSTLMKLCARFYDPGEGTVSMGGQDLSTLEPESLMKNISMVFQDVYLFQDTIRNNIRFGKNDATDEEIIEAAKKAQCHEFITKLSKGYDTMIGEGGCTLSGGEKQRLSIARAILKDAPIVLLDEATASLDPENEVEVQRAINTLIAGRTVIVIAHRLKTICNADTIVVLDEGRIVEKGRHEDLLNNHGLYAHLWDIQTQIAGWKLMEYIFELEMQVRDYECDMEGIVNNAIYQHYLEHTRHEFLASSGISFIEMHERGVDPVVNRIEINYKTPLRSRDKFISKLYMRREGIKYVFYQDIYKTSGETCIKAVVETVCTVNGRISRGEEFLPYFEKYLQMEQEVIYRIALSRLKGINKALAQHIHETVESLETFFELPESQLQKITGIKGRILHEDNRQTALQEARKEMEFIRKGCIEPLYFTEPNYPQRLLDCIDAPPLLYYRGNADLNSSKIISIVGTRRATEYGKDFCETLIRDLSEYFPQLVIVSGLAYGIDICAHRCALRHGLNTIAVLAHGLDHIYPANHRSTAVEMVSHGGLLTEYTGYHRMHPAFFVARNRIVAGLADAVIIVESREKGGALITAGIAESYHRDVFALPGSIQSESSAGCNHLIRRNRAALITSADDLVEAMCWNAPRKQAVQRSLFPELTDEEQVVTNYLTQKGEGQINRMTVDLNQPLSQLLSILVELEFKGVVKALPGGIYKLMEHHHHHHVHPTPDMQKLNRSFIVGIVLNIVFVLAEAGAGFYYDSLALLSDAGHNLSDVVSLVLAMFALRLSMAKPSLQYTYGYKKSTVLVSLLNAAILFVAVAVILYESVEKFSNPTPLDGGAIAWVAAIGIVINAFTAYLFFADKSKDLNVKGAYLHMAADTLVSVGVLVSGIVIKYTGWNVIDPIIGIVVGLVILYSTWHLLQESLRLALDGVPEGIDVQKVETVLSSDPDVLNVHHLHIWAISTTQTALTAHIVVKDITHMHEVKHRLKHDLQDLGIEHATLELELKEEHCDGHCDCCEEQQGCDSDTQPYLMKEIVVSGIRSTGNLHLGNYYGALRNFVKMQEEAKYNSYFFIADLHALTTHPDPKTLHENVRNILCEYLAAGLDPEKSTLFVQSDVPEISEMYLLMNMHVGIGELMRTASFKDKARKQLGIKTNNDEDIEHEIIGGNSNKRVNAGLLTYPTLMAVDILIQHANYVPVGKDQEQHLELTRRFARRFNSTYGVEYFTEPQNFNFGSDPIKVPGLDGSGKMGKSEGNCVYLVDDEKTLRKKIMRAVTDEGPQVPNSPKAEPVENLFTLLKIVSAPDTVAYFEEKYNTCEIRYGDLKKQLAEDILKVTLPIRERFLEIQNDEAYLARVVKMGAEKARESASKTLREVREIMGFKPFMDRMEQMLAFARNCAKEAGKIQLSYFRGNHLHIETKFNMHDVVTVADKESERYIIGEIKRTYPEHAILGEESGMHAGDSEYCWVIDPLDGTTNYSQGLPIFTVSIGLQCKGETVLGVVYAPYLNELYEACKGKGAMLNGRSIHVSGKNDTQESVVSTGFPIDKDRNPDNNLDNLARILPMVRGVRRQGSAAFDLCCVAAGILDGYWEFNLHLWDVCAGILIVTEAGGTVRSFREDRNVPIVVGTPAIVEQLYPRLSDKPGKICLMGHHQLDELDYKILKLVASNARIPFLEVARECNVSGAAIHQRVQKLTNLGILKGSEYIIDSNKIGFETCAYMGFYLKNPGDFSHVVEELRKIPEVVECHFTTGQYDMFIKLFARNNQHLLEIIHTKLQPIGLSRTETLISFREIFRRQLPIEEVEDLDMIQISQVYANDSNSLKFIERIYTESFPPDERRDFSDVIRLLEENDDFFIVLLSDENKAVGFISYWEWNDFSYVEHFAVDSSCRGSGYGATAMTELLKLINNPAVLEVEKPLDDISQRRIRFYERLGFVLCTRPYTQPPYSPEKQPLELYLMSFGKIDLNQVFDTVASRIHQKVYGVEMKNHSFLKYCTSILLIFIAVACTTGNKEQKIVTVTIQPQKYFAEKIAGDRFNINCIVPPGSNPEAYDPSPSHLVHLGKSIAYFKIGHIGFELAWMDKLEQNNPNMKIFDTSEGIDILSGTHEHNDADVHHHHFDADPHTWSSPKNVRIIAQNMYEAFVSIDPDGEKVFRKNYEELLDEINQVDSIMTERLSPVSGTMFAIYHPSLSYLAKDYNLHQLSLEYNGKEPSAFYLKKAIDIARENNVKVIFIQQEFDAKQAESFASEINAKVVPINPLSYNWSEELLHITDAIAGKMPLLENKIIAIENVWLSYTDKNILEDINLDIYQGDFLLITGPNGGGKTSLLRTILRLQSPTKGRISFFRQGEPVSSLDMGYLPQKNSIDSRFPITVEEVVASGLMGNTQKGNTKFDSKKEIDEMLDLMGITALRNKPIGVLSGGQLQRSLFGRALISKPEMLILDEPASYIDRQFGNRMFEILRDLSSNGTTIMMVSHEIEPFITLSNRNLYINHILGDRMAFRKDNKIKSNFSKISIGLASPEEILENSSGEVLKPETINYRTYKPERDGLFCERIFGPVKDYECHCGKYKRIRYKGIVCDRCGVEVTEKKVRRERMGHIQLVVPVAHIWYFRSLPNKIGYLLGLPSKKLDAVIYYERYIVIQPGPQSDLATYDLLSEEEYLNIMDSLPRENQMLEDTDPNKFIAKMGAEAIYDLLSRLDLDELSYDLRHRASTDGSQQRKTEALKRLQVVESFRASKGRNRPEWMILKVIPVIPPELRPLVPLDGGRFATSDLNDLYRRVIIRNNRLKRLMEIKAPEVILRNEKRMLQEAVDSLLDNSRKSSAVKTEANRPLKSLSDSLKGKQGRFRQNLLGKRVDYSARSVIVVGPELKMHECGLPKNMAAELYKPFIIRKLIERGIVKTVKSAKKIVDRKEPVVWDILEHVMKGHPVLLNRAPTLHRLGIQAFQPKMIEGKAIQLHPLACTAFNADFDGDQMAVHLPLGNEAILEAQLLMLGAHNILNPANGAPITVPSQDMVLGLYYITKLRPGSLGEGLKFYGPEEAEIAYNEGKVSLHAPVSVVVKDVDKDGNIIEHMVENTSVGRVLVNQYVPQEIGYVNEILSKKSLRDIIGKVIKVCGVTRSAQFLDDIKNLGYYMAFKGGLSFNLGDVLVPPEKETLVAEGNAEVEQIMNNYNMGFITYNERYNQIIDTWTHVNSRLSDILMKQLSADNQGFNSVFMMLDSGARGSKDQIRQLSGMRGLMAKPQKSGAEGGQIIENPILANFKEGLSVLEYFISTHGARKGLADTALKTADAGYLTRRLVDVAHDVIIHEEDCGTLRGLVCTEIKNNEEVVASLGERILGRVSVHDVVNPLTNEILVHAGEEITEVIAKKIEDSPIEQVEIRSVLTCESKKGVCAKCYGRNLSNNRMVQKGEAVGVIAAQSIGEPGTQLTLRTFHVGGIASNIAAVSSVTSRYEGILEIDELRTVENVSDSGTRVQIVVGRLAEMRIIDPNTKMVLMTANIPYGSKLFFNNGDTVKKGDMICEWDPFNAVIVSEVGGRVNFEAVEEGVTYRVESDEQSGLKEKIIIESKDRTRVPSAQILDEAGQVIKSYALPVGAHLMIEDGDTIKTGDVFVKIPRAVGKAGDITGGLPRVTELFEARNPSNPAVVSEIDGEVIFGKVKRGNREISVVSKTGETKKYLVPLSKQILVQENDYVRAGTPLSDGAVTPSDILAIKGPTAVQEYIVNEVQDVYRMQGVKINDKHFEVIVRQMMRKVQILDPGDTRFLEQQIVDKRDFMDENDRIWGKKVVTDPGDSQTLKAGQIVTARKLRDENSALKRKDLKLIQVRDAIPATSEQILQGITRAALQTSSFMSAASFQETTKVLNEAAINGKVDTLEGMKENVICGHLIPAGTGQREFDKLIVGSKEEFDRVFANRKNVTDFSNMSSTIGKPRVNFASIKNPLPYPDFLEVQLKSFQDFLQLDTPPEKRKNEGLFKVFAENFPIADTRNNFVLEFLDYYIDPPRYTIEECLERGLTYSVPLKAKLKLYCTDPDHEDFATVIQDVYLGPIPYMTAKGTFVINGAERVVVSQLHRSPGVFFGQSIHANGTKLYSARIIPFRGSWIEFATDINNVMYAYIDRKKKLPVTTLLRAIGFETDKDILEIFGLAEDLKVSKASLKKAIGRRLAGNVVKAWVEDFVDEDTGEVVSIERTEIVIPRETVLEESHIADIIESGVQNILLHKEDSNTSDYSIIFNTLQKDSSNSEKEAVLYIYRQLRNAEPADDASAREVITNLFFSEKRYDLGEVGRYRINKKLNLSTSPDVKVLTKEDIIEIIKYLIELINSKTDVDDIDHLSNRRVRTVGEQLYNQFGVGLARMARTIRERMNVRDNEVFTPIDLINAKTISSVINTFFGTNALSQFMDQTNPLAEITHKRRMSALGPGGLSRERAGFEVRDVHYTHYGRLCPIETPEGPNIGLISSLCVYAKINDLGFIETPYRKVENGKVDLSPEGVVYLTAEAEENLVVAQGNAPLNDDGTFVRNRVKSRLEADFPVVSPDQVNLMDVSPTQIASIAASLIPFLEHDDANRALMGSNMMRQAVPLLRPEAPIVGTGIEGQLIRDSRTQITAEGDGVIEFVDATTIRIRYDRTEDEEFVSFEDSVKEYIIPKFRKTNQSTTIDLRPICHKGDRVKAGDILTEGYSTENGELALGRNLKVAFMPWKGYNYEDAIVLNERVVREDILTSVHVDEYSLEVRETKRGMEELTSDIPNVSEDATKDLDERGIIRIGAQVNPGDIMIGKITPKGESDPSPEEKLLRAIFGDKAGDVKDASLKATPSLKGVVIGTNLFSRAIKKKKSKLSDKAILPKLDEEYEEKMNGLKAILIDKLLVLTQGKVSQGVKDFMGTDVVSKGTKFTQAVLNKIDYTTVQVSKWTTDAAKNELIRATIINYLKKYKEYDAELRRKKFDISIGDELPSGIVQMAKVYIAKKRKISVGDKMAGRHGNKGIVSRIVRQEDMPFLADGTPVDIVLNPLGVPSRMNLGQIFETVLGWAGAELGEKFATPIFDGASLDDLNTWTDKAGLPRYGKTYLYDGGTGERFDQPATVGVIYMLKLGHMVEDKMHARSIGPYSLITQQPLGGKAQFGGQRFGEMEVWALEAFGASHVLQEILTIKSDDVVGRSKAYEAIVKGEPMPTPGIPESLNVLLHELRGLGLSVNLEMADLKAFAEQLVNLTVKEVNELAQILKDEYGIEPAAAAVAVAAAPAAGGAAAEEKTSFDVVLKAAGANKLAIVKLVKELTGLGLKEAKDLVDGAPNNIKEGLAKADAEALKKQLEEAGAEVELKMRKEDKGTIIAQIAETVKEYSCFYLAETATLNAEKTSNLRRACFKEGIKMMVVKNALLHKALEGLDTDYSPLYGSLKGSTTMFFANVGNAPAKLIKEFRKTSEDLVLKAAYVEEGFYIGADQLDALVAIKSKNELIAEVIALLQSPAKNVVSALQSSGSTLHGVLQTLSERMGKLTKNQKLALAKIEAGKAYSLGEASQLVKDITYTKFDASLDIDVRLGVDPRKANQMVRGVVSLPHGTGKQVRVLVLCTPDAEAAAKEAGADYVGLDEYIEKIKGGWTDIDVIITMPAIMGKIGALGRVLGPRGLMPNPKSGTVTPDVAKAVKEVKQGKIDFKVDKNGIVHASIGKISFTADQIRDNAKEFVSTLIKLKPTAAKGTYIKSIYLSSTMSPGIKIDPKSVDEIMAKEIAGQIKLQIKGGAANPSPPVGPALGSKGINIMEFCKQFNARTQDKAGKVLPVVITYYSDKSFDFVVKTPPVAIQVMEAAKVKGGSAEPNRKKVGEITWEQVKAIAEDKLVDLNCFTVESAMKMVAGTARSMGITVKGEFPVNNMSEEKKGWYVLRAISGKENKVKEVLDAEIKNTDLGNYVFQVLIPTEKVYTVRNGKKVVKEKNLYSGYVFVEAILVGEVVHHLRNTTNVIDFLGGKSNQPEPLRPSEVNRMLGAVDEMQEVGDEPAVVYHVGETVKVNYGPFNGFSGIIEEVNNEKKKLKVMVKIFGRKTPLELENSQVEREMKKLKILADIQDSYNELVHKVSWPTKSELANSAVVVMFASLIIAIVIFAMDQCIDKIMHLIYGGLMAKEQFQRTKPHVNIGTIGHVDHGKTTLTAAITTVLAKKGLSELRSFDSIDNAPEEKERGITINTSHVEYETANRHYAHVDCPGHADYVKNMVTGAAQMDGAIIVVAATDGPMPQTREHILLARQVNVPRIVVFLNKCDMVDDEEMLELVEMEMRELLSAYEYDGDNTPIIRGSALGALNGEAQWEEKVMELMDAVDNWIPLPPRDVDKPFLMPVEDVFSITGRGTVATGRIEAGRVKVGDEVQILGLGADKKSVVTGVEMFRKILDEGEAGDNVGLLLRGIDKNEIKRGMVICHPGQVKPHSEFKAQVYILKKEEGGRHTPFHNHYRPQFYIRTLDVTGEITLPEGVEMVMPGDHVTINVKLINPVACDKGLRFAIREGGRTVGSGQITDILDMEIRIQAIHFDASEKLEKFIQKKVSKLEQYYDGIIAVEVSLKVVKPETAQNKEAGIKVLVPRNEDMFSCKVADTFEEAVDMAVEALVKQLLKTKEKMREKMPIESFLEYIRYEKNLSTHTVLSYRNDLFQFKKFLETECDGIEMQKVTSDCIREWVALLSEGGMSARSICRKISSLRAFYRYLVVQSDIQESPVKNIPLPKVHKKMPVYLRQDSMNELLDDVSYGEGFEAVRNKLIIAMLYHTGMRRAELIGLRDTDVREGEIKVTGKRNKQRLIPYGEELSQMIAGYRQARKESCGDDCGFFFVRENGEPLYPQLVYRVVNGSLSKVCSLDKRSPHVLRHTFASAMLNNGATLNSVKELLGHHSLASTEVYTHITFEELKQSYNQAFPKRKSMIIVPVKEGENIEKALKKFKRKFEKTGVVKELRNRQAFEKPSVTNRKKMMRAIYIQKLQQIEDMSKSTLPRLKALRDEMGKAGITAFIIPGTDPHQSEYYASHWAARTWISGFDGSAGTAVVTTNQAGLWTDSRYFLQAAQQLEDSGFELFKEGLPDTPTIEQWLLTTLPQGATIAIDGTLFGASKAAAMKQNFESHGFRFVSDFTPFDSIWEKRPSIPKNEAFIHDEKYSGESISDKMARIMEQVRQAGAAALLLAALDEIAWAFNIRGTDVECNPVVICYAYIDDSRRILFIDKAKINDTVCQYLQKNSVEIMPYENIFDFVAALPAEKKVFVDTNKINYTLLNKLHAIPVSGQSPIALLKSIKNETQLAGTREAMIRDGVALVRFFRWLEKNIDSGKVTEITVAEKLREFRSQQSLYVGESFATIAGFNEHGAIVHYSATPESNAIISRKGFLLIDSGAQYLDGTTDITRTVSLGNLSPRQKRDFTLVMKGHIALATCHYPQGTRGAQLDALARHFLWDDHLNYLHGTGHGVGHFLNVHEGPQNIRLEENPTPLMPGMITSNEPGLYRTGEYGIRCENLVLTVPDYENEFGMFYRFETLTLFPFDTEALDISIMTEKEIEWLNSYHEMVYDRLSPMLDEEEQQWLHRKTTAIMALIKSVRGFTPKVGKDCFLADNAVLIGDTVIGDECSIWFGAILRGDVNSIRIGNRVNIQDGSVLHTLYEKSTIEIGDDVSIGHNVTIHGATIHDGALVGMGSVILDHAVVGEGAIVAAGSVVLSKTVIKPGELWGGTPAKFIKMVDPEQSKEINQKIAKNYLMYSKWYEEEMFSEKQGNVLHGILLIVLFSFSAFYIAEFQFIKNLSLSPLIVGIILGMLYANSLRNRLPETWVPGIKFCSKQVLRAGIVLYGFRLTFQSVIAIGASAILIDVIIVTCTILLGILVGKLLNMDNDLALLTATGSAICGAAAVLGAEPVVKSEPHKTAVAVSTVVIFGTLSMFIYPILYRAGVFDLTPEQMGLYTGSTLHEVAHVVGAGNAMGKEISDSAIIVKMIRVMLLAPVLLIMSFALARRAVKAVKGDKNTTATQRGKITIPWFAFGFLAVIGFNSFDWLPVPVVDGINSLDTFMLTMAMTALGAETNFEKFKQAGAKPFLLAAILYIWLLGGGYLLVKWLAMAKKVIRSDIRVNKYISDSGFCSRREADKMIADERVTINGELATLGSRVAEGDKVKIDGEPLHFIPMEQREYKLRRYGSSRKEKLSGAENPKVEKTQRGRRERFASGQEELRPNRRSKNSMVKKSDEASHQGRKPKTYAPKKVVKEGEEKSKNRTRTKLVPGKSSSGNVKKKIKMDATKIPTNVGSIGIFDSGYGGLTILEQVRKGLPRYDYLYLGDNARAPYGTRSFEIVYEFTKQAVFHLFDEGCSLVILACNTASAKALRSIQQKDLPRLAPDKRVLGVIRPTVESLSELSRTGHIGILATPGTIQSGSYELEIKKMYPEFVVYGQSCPMWVPLVENNEAQGRGADYFVKKYIDELLSQSDEIDTIVLGCTHYPLLLDKIRAYLPPSISVVLQGPLVTDRLDDYLKRHPEIESRCSKGGGCRYLTTESPRKFSEAATLFLNEPVEAEHIVLGMIKKFLFAAVCICSLSFVSQAQQALKFGTVNSQEIFMLMPEKATAEQTLQDINKKYEDEFVKIQEEFTKKYKEYMALGDTIPETIRARRMQEVQDSQSRIESFREMASQDIQKQQEALFAPIQQKLMDAIKSVGAEGKFTYIFDLAYPIVIYQGAPSEDVTPLVKAKLGLKMKRIVLFAMAVLAFTASSVAQKYALVDMEYILKNIPSYEMANEQLNQVSQRWQKECDDKAAEAKTMYKNYQSDLVFLTEEMKVKREEEIRDKETEVVELRRKYFGPEGELFKKRESLMKPIQDDIYNAIKKISEDKGYMMVIDRASSPNIIFASPKIDISNEVLTKLGYSKMPLKSLAVFLFLSFCVQVVTAQNEEKLDTIYNPKVVYSAIPQKYEIAGITVTGAPNYEDYVLIGYSGLEVGQVIEIPGNAITEAAKKFWRQGLFSDVVIKWTKAYGNKAWLEIQLKQQPRISEINYHGIKKSEREDLEMRLGLVKGNQITPNIVDRATTIIKKHFEEKGFKNAEVNIKQTDDLTHENEVIVDIYVDKKEKVKVHKIYIDGNEVLSDRKIKWAMKKTNEKGNLLHLFRTKKFVEENYKNDKNLIIEKYNELGYRDAAIVNDSVVRYNDKTVDVYLTIDEGKKYYIRNIDWVGNTIYPSDYLSAVLGMKPGDVYNQKMLNKRTMEDEDAVANLYMDRGYLFFQLVPIEGNVLNDSIDLEIRLFEGPQARINKVVINGNDRLYEHVIRRELRTKPGELFSKSDLMRSAREIAQTGHFDPETMDIKPEPNEENGTVDLVYNLESKANDQIEFSAGWGQTGVIGKLSLKFTNFSIKNLLNPKSFKGIIPQGDGQTFTISAQTNARYYQQYSISFYDPWFGGKRPNSFQFSAYYSRQTGIESSFLSRSYNSLYNNSLYGGYWGNSYLGNSYYDDYYQNAYENALDPNKSLQMIGVSFGFGKRLEWPDDYFTFMAELGYQAYILKNWEYLYYMQNGTSHSFTLGLTLGRSSIDNPIYTRRGSQFTLSAQFTPPYSLFSKKDYKSLYESSSRADREELYRWIEYYKIKFKSRVYTPLNNSEKYTLVLMGRADFGLLGSYNKYKQTPFETFHVGGDGMTGSYTYATETIGLRGYDNGALTPYSDGRAYTRFSMELHFPFLLQPSSTIYGLAFVEGGNAWTSLENFNPFSLKRSAGVGVRIFLPMIGLMGIDWAYGFDKVQGEKGGGHFHFILGQEFMTYVEQINLTRVPKHIAIIMDGNGRWAKERGLDRSEGHRKGLDVVHEITDAAAEVGVQYLTLYAFSTENWNRPQAEVDALMALVVFGIERETPGMVEKGVRLSVIGDLDRLPSDVKARLLKCIRDTSGGERIVLNLALSYSSRWEIARAARCIAQEVQKGRLSVDDITETTVDEFMTTVNMPNPDLLIRTGGEIRLSNFLLWQLSYAEFYFTEEYWPDFTGESLYRAIVEYQARERRFGKTSEQLMKKIIPIIVIIMSSTAVLSAQDFRYDAGIAGGISCYMGDANQVSPWHRPGAAISGVFRFLLNYRWAVKTDISAMQFSGDTRDFDNRFPNGSDYSFESWQYRLGGQIEFNFFNYGMGYSYLGTKRLSPYLLAGVGVGYSTVGGGYVSFDASLGAGVKYKIAPRWNISLEFAMHKTLGDSFDGKALADPYHIESSVLKNTDWFSTTLFSITYEFGRKKEICNNDNRMKKQKIYFFLCIAALFLSGISCNSTEDDVISYTVSESVRVSGFSLAANDSVLAHLDTIFFTIDLNKGQIYNADSLPVGTDVSALIANISFDNVAQAKIYMDKGDPAKNDTIDYIANPTDSIDFTSKVSLEVTAQNGTTVKWYSVKVNVHQIDPDSLYWNTMFGVRPLPCGSQATVDAQKAVYYKGKVQSFIVSNSTCTLYTAEDPYADDWTPQPLSLSFTPDLKSLQATDEALYMLSQTGELYRSENGVEWTSTGQTFYSLVGTWKSRLLGVVSENGVYKHDCYPRPAGFVPYPTAANFPITGSSPMVTFVSEYDLDSPQSIMVGGRMADDNLTGATWGYDGEAWAQLQGSIKPCEGAILFPYFTFTTSEYWITTQYTSWIVIGGREAAGVADSVYVSVNNGNTWSKAPQSLAMPTYINPRAFASVMVVDADFTSRSAASLWKFMPIRRVPAMSVARTSDYQIPYIYIFGGENNSGDIYNEIWRGAIGRLRYPPIPMQLQSANLATFFSLYTTNTDNYNYLWINRFIYIDFPVQKMDKTDMDAVFMRRCLQLASLGRGHVSPNPMVGAVVVHRGQIIGEGYHRCYGQPHAEVNAINSVRDAGLLPECTLYVSLEPCSHYGKTPPCADLIVQKKIPRVVVGCLDPFPKVSGQGVARLREAGVEVVTGVLEEECKALNRTFMTCQIDERPFVTLKWAQSRDGYIDRIRKPGEPAIRISDDVSSVWVHRLRAEADAILVGTNTAVADNPSLTTRLWYGRSPLRIVLDEHARVPSGSHVFTDGLPSLVITAKDIVYPVLPDSVEVIRLPFGKDLIPGLLNELYRRRIQHLLVEGGAVLLQSFLDSGYWDETRVETGPMFLGNGIVAPVVKGMLVRSEYCGEAKIDWYENRMIGVVFLHEISIPKNQNSFLTLHGFTNIDLPMQQSIDLLRRKLGEIYPPGEIIGFTRMIFETLCGYTPTDILLHKDTILSEDIHRKIERITDRLSQQEPIQYILGYTDFCGRRFDIAPGALIPRPETEELTRLVITENSGQPSRIADLGTGSGCIAVTLALSLPDSKIEAWDISTEALEIAQCNARKHNAHVNFFQRDILRYDVSELPEESLDIIVSNPPYIRRCESRSMSANVLEYEPHIALFVPNESPLLFYEKIAMDSVRLLSPGGKLYFEINETQGEACARMLETAGYKHIRVIKDLYEKNRFVSAIKPIRHGMAKTLTPPEALHRAAALCSSSEHCIADIREKLSRWGIGEPDARTIVERLVQERFIDEERYAIAFAKDKFRFSGWGRIKIRYALQQKRIGNSDIVNALSLIDEEAYTTRLVDLLEKKSRSIHDEDVEIRRSKLLRFAASRGFETELVFHILKGIESMKTPPFLKDFIDLFFPRLCPVCQRALNRNEENICTTCLHRLPRTGYHLDPLSPMAQLFLGKVPIEKCAAFFFFSTPSDARQLIHHIKYHGGKQCGFTLGKIYANELLHSGFFDDINALVPVPLHPAKLRRRGYNQSEWIARGIEQVTGIEVCTEWLYHSQNTKSQTGKNIYERWLDTRTAYETDSELDLSDKHILLVDDVVTTGATLLACAQALYLHGKPRISCLTLAAVLMKTVERLLAEKLLKISAIKLQPENPFVWASGWNSPIYTDNRRTLSYPEVRTFIKVELCRVIMENFGEVDAIAGVATGAIAQGALVAETLGLPYVYVRSAPKDHGLENLIEGNLKPGQKVVVIEDLISTGGSSLKAVEAIRNAGCEVIGMAAIFTYGFPVAARKFKSAQVELITLSNYNAMLETALETNYIKPEDLETLQEWRKDPASWQGPNNNTPSVMTSFESKTVRIAHSSERVFELLSDLSNLERFKGALNAPGNEKLKITGYDKDSLSIEVSPIGSITFRIIDREPNKTIKFEAENSPLPLNLWIQLVSTGENETASRITVKAELNPFIKPMVSKPLQEGVDKMADMLVILPYEMAQKLWEKSVQVDRDVERFTVGKDREMDLYLAPFDILGSLAHISMLQSIGLLTAEELKQLTEELRNIYRDTETGKFLIEEGVEDVHSQVELLLTRKLGDIGKKIHSGRSRNDQVLVDLKLFTRSRLQNIVKKTEKLFDTLIAQSEKYKQVLMPGYTHLQVAMPSSFGLWFAAYAESLADDLIVMQAAYRVCNRNPLGSAAGYGSSFPLNRTQTTDSLGFETMDYNVVYAQMGRGKTERIVASAIASIAATLAKLAFDACLYNSQNFAFIKLPDAFTTGSSIMPHKKNPDVFELTRAKCNKLQALPYQITLIANNLPSGYFRDLQVIKELFLPSFDELEECLDMVDLMISQIAVNEHILDDKRYDYMFSVEEVNRRVQTGTPFRDAYKQVGLEIEAGKFSPDKHIHHTHEGSIGNLCNDRITELMRKTIDSFDFARTEAAEARLLGRMEYKPQPDRYTNGMLYRRCGDSGIQLPVISLGFWHNFGNTDCYATGLELVEYAFDHGVCHFDLANNYGPPAGSAEENFGRMMKQSFAAHRDEMFITSKAGHEMWPGPYGGCSSRKNLMASIDQSLKRMNLDYVDLFYSHRYDGITPIDETMQALVDIVRQGKALYIGLSKYPVDKLLYALNYLHDAGVPCLAYQDRYNMFDRHIEKEHLQICMEKGIGVVAFSPLAQGILSSKYLNGIPADSRAARPEGYLKQSDVTPDKIAKVARLRPIAEQRGQSISQLAIAWILRRKEIGSVIIGARNLDQLKDSLHAVDNLSLSPSEIELIENILKMKRTGNILILLLIIIIATSCDGGDRDRIPAAAVRVEFANQAMWDLYGVSGSFIHRRFIRNQKIPAGFPYTDLSATGYGGLMLITNEHGVPYVYDLCCPVEINSNIRIEFDENNLCLRCPKCGSTYDITTGGPMTGTAKDGRYFLQSYNIAPYGSAGGQLIYRMKELIKKILSEKDAKEGLHVRMIAERILMSGASGDMSIDEVLRKVTQILNREVKKKNAADKDFARVKNPKTGKFRAGVYKLRIKKKEPLPIPIIDEKQNKDVILKETTTSQSQKTTTNYMGKAGEYAVMSELLFRGYNANNMSVDEGVDIVASKDNVFFFVQVKATELKGNYTAHTQIKVNRFDAFINTQIRYIIVVRCKENNAYKNIFFTFSNSDIEQFKFHKCVNTSDDYIYIKIRFDVDTHKPVLYHENKSLDMSFFMNRFQLMRNQILLFSLLLTITSCTEYLLYYQTYTVESELEQNEGSLKYENEDCALYYNLWAEYGNPGFVMENKTDSDLFVLMDRSFYIHNGVAYDYYANREITESYTSTYEESISIDGKAIYPYYSFFNPIDATKKVGYGTNHVSSITVKEQPVICIPPHSAKYIPVRYPISDGNRLYHDGSVSPEQSPYIFTNRISYKSNNEDSIKHVENEFWVSNIEQIKPHIGFPDKSVKREKKENVLADEKNPNKFYIKYYEKNSLFMDTTLKRKNIDLPVDTLKKLSLMAVAQGKSLKAYIEQVLISKANGITIEVSENPSPSGDKWFDDPVNMESVNRGIEEMKAGKGTTYSMDKLRELLDSMNYELILMPEAERHLKEWIKSGQKKTLRKIVALFEELRQHPNSGTGQVEQLKGELQGFWSRRIDKGSRLVYKIDEDIVTVFVISMKGHYGDKMRNPVMLRDTAGEEDKHEQSLLIIDRTVLAGWTFLVLKKGCMNEILKLDNIFQYNDMMGQETLHPLVSVVDFSKCRPMLHSLQRFGFYAVFLKDVKCGDIRYGRNYYDYQEGTLVFLAPGQVVGIVNNGEYFQPKGWALLFHPDLIRGTSLVREMKNYTFFSYESNEALHLSEQERKVILDCFHNIESELQHAIDKHSKTLIVNNIELFLNYCVRFYDRQFITRSNVNKDILSRFENLLNDYFQSEKPQIIGLPSVQYCADSLHLSPNYFGDLIKKETGNSAQEYIQAKLIGVAKDRIFDTSLSVSEIAYSLGFKYPQHFSRLFKQKVGVTPNEYRMRNMNKNVLILSSSPRRGGNSDRLCDAFLQGCKDAGHTVEKIFLKDKHINYCTGCGICSMYGKPCPQKDDAAEVIEKMIAADVIVMATPVYFYTMSAQMKTLIDRCCARYTEITNKNFYFIVTAAEPSIPAMERTIDGFRGFLDCLEGAREKGIIYGTGVWKIGEIEGKPILKEAYEIGEKIMTNKIILIMMLLTCLSIPAQKKGIDEKILVVYFSHSGNTRTVAEQITRSTGADLFEIQPQEAYPTDYHSVVNQAKKEINNNHRPALKNDVQDFDKYDIIFVGSPNWWSTIAPPVATFLERHDFSGKTIVPFMTHGGGRFGHSISDMKKLCPDASFLEGLAIRDSYVNDNCQDVVKWLQTLKLLKMKQKIVLIIGISLSLAFGVEAENDKKDTTMDRIETCKQNYTRLFGGEALTGKGSDPELMDILQKFIFGEVFETGSLDHKTREMITCVTLASMQTLPQLKSHAAAALNVGVSPIELREAIYQCAPFIGFPKTLNAISTINEVFQEKGIPLPLEAQGTVNEDNRYEKGKEIQYPLYGDEIARTFSNLPDEMNESLPRFLTEVGFGDFYTRSGLDLKTRELLSLCVLAAIGAESQIHSHSKGNIKAGNDKATQIAAMIQCLPYIGFPNALNAIRIIDALMKTIKLNNGVEMPVLGYGVFLVNSEECERCVLDAIEVGYRLIDTAQAYYNEDGVGRAIETCGVPRNELFITTKVWISNAGEEKAFRSIGESLRKLKTDYIDLLLIHQPFGDYYGTYRAMERAYRDGMVRAIGLSNFYDARFVDLVENVEVKPSVLQLETHVFSQQKRMRELINDYGMHLMAWGPLAQGSDRLFTDETLKAIGTKYGKTNAQVALKFLTSEGIVAIPKSIHKDRMASNFDIADFELTEEDKETIRKMDTGKLKVDFNDPDMARYLLEYDKKFNPNSMKDVRLNNGVMMPAIGFGVFQIPENETERVVTDAIEVGYRLIDTASAYFNEEQVGSAIRRSGIKREEFFITTKLWVQDYEYDDALRAFDLSMKKLGLDYLDLYLMHKPYGNYYAAWRAMERLYKEGRIRAIGVTSFSDERLQDLFLHNEVRPAVNQLETHPFFQQQAANTFLQQEGIQHEAWAPFAEGQNDIFNHPVLKEIAVRHGKSVGAVVLRWLNQRNIVVIPKTVRKERMIENLNIFDFILTDEEMKAIAGLDTRKSPIYDDMDLPTVRAIGTHKIHDMEQTDFDGIVFADTLQDFNTLRYAGHIVHILCCGGNMGFTFQDTRYNIAVGDYVILPNGELGSEFSISDDFQGILMSLSETFVASIAIRNNYGIIGHLSLLQNPVMKLSPHDFRICEAALRVLRMRMTEKGHSFYEELLGSLLTAHILDLYDIHARSRNISQLSEHTASQLRKFIELLYNGEYIRNRELDFYASRLCITPHYLSELCRKVSGRPATYWIDRFTIQEITRLLRQKELSLTAISERMNFSSVSYFSRYVQKRLKISPSEYRNCYTRDMHQSFSGSGRRSSVCDGLFQRGKERRYDSLTGMSPMDYRTFSKRQVLVEMKKRQEESLVWLDWAKELQFIAQAGLTYSKDPFDLERFQRIREISAEIVSRQTGLSFERVTDLFCGETGFQTPKLDTRAAIFQDGKILLVEERDGTWSLPGGWVDVNQTVKTNTEKEVLEEAGLEVEAVRLLALQDRNLHNRPPYAYNVYKAFVLCEIKGGSFRPNIETQGSAYFALDELPPLSEDKVTREQIVLCFEAVQTDDWVVPFDMGLGRIDMEGVAGGGIEVFKVKRNIIYVSLAVVWFGKETVYPIHYSAGFAVMFANAKNSSDDIIIRLIMDINTTIQKKSLAEEVSSLIREQINDGKLTKGEKLPTEPELMKLFGVGRSTVREAIKMLVNMGYLSVQQGRGTFVESVTETNEPFHQRLKRADIQELREVRDIIEAPIARLAAQRRTKIDLENMKRYIQERGEAAKSGDVGRCIAADINFHNSIARATHNEILSELYHSMTVHLTSGYDYIYEDTTYLMKSQPLHERLLHHIETGNIESAMRAAKLLWKDVNIEKESDEEHFNMKSILIKLKGHPHVQKGTAYTILFAMGFCHLLNDMIQSVIPAMYPVLKDNFGFTFAQIGIITLVFQLTSSVFQPFVGQYADRRPQPYSLSAGMCFTLTGLLLLAFASNFFLILLAVAIIGCGSSVFHPEASRVAQIASGGRKSLAQSIFQVGGNGGSAIGPLLAALIIIPYGQHAVGWFSIAALLASAILVRVGYWYKLTLSQTGMSHRAQQTTSCNLSKKAIRNALIILVIMLFSKYFFISCMTSYFTFFLIEKFGITVQQSQLCLFAFLAALAIGTLLGGFLGDRYGRKYVILFSILGAAPFTLVLPYLNLFWTLVITVIIGFIIASAFSAILVYATDLKPDKVGMISGIFFGLMFGLGGIGSAFFGWLADETSIEFIFKVSTLLPLLGIIAGFLPNIKPSNRMKAKENAPLTTSSKVAVLFEVTPKKEYKETYLQLGAMLKSELTNMPGFISVERFLSLNEEGKLLSLSFWENEEAASNWRNKMNHRNCQKKGHDLLFEKYKISVAEVIRQYTKDDRQEAPEDSNRYLTTKMTEYFQYGEKELAYLKQRDKRLSEIIDKVGWVKRRVIPNLFAALVHSIVGQQISTKAHETIWQRIQSSLGEITPQRVISLTDEELQRFGISFKKVTYIKRAATKILNGEFDIHGLYDKTDEEVIECLSKLDGIGIWSAEMLMLFSMQRPDILSYSDLAIQRGLRMVYHHRDITRKLFEKYRRRYSPYSSVASLYLWAVAGGAIEGMKDYATTKKKRSMNTKHVILTQHYPSPCGDLILGSYEDQLCLCNWVIEKHQGRVDKRLQNLLNADYKEGKSDIIQEAARQLDEYFKRERTTFDIPILFTGTDFQKKVWHKLLEIPYGQTLSYGEMAKRLDIPNAVRAVANANGANALSIFVPCHRVIGSDRSLTGYGGGLTAKKYLLELESIATVGIFASSLMHIPLPPAVPRNAAGCCGANRGGVRRTEGLKENLDCHFNPFPLLTFSAIGSVTWWGNIGVISVMLRKIRIVAATICFTLITLLFLDFTGTLHLWFGWLAKIQFLPAVLALNVGVVAFLVILTLLFGRVYCSVICPLGVFQDIVSWISGKRKKNRFRYSPAISWLRYSMLALFIVALLAGFTAIAALIAPYSAYGRIASNLFAPLYQWGNNLLAYFAERIDSYAFYSTDVWLKSIPTFIIALVTFVSLLILAWKNGRAYCNTICPVGTVLGLLSRFSLFRPVIDTTKCNGCQSCARNCKASCIDAKNHLIDYSRCVACMDCIEKCRQGAIRYLPRKKTTSASVEPAHEDKKENPRREFLSFAGLLAGTALLKAQEKKVDGGLAVIEDKKIPNRITPITPPGSLSASNIAQHCTACQLCISACPNQVLRPSGNLMTFMQPEMSYERGYCRPECTKCSEVCPTGAIRPITVAEKSSIQIGHAVWVKKNCIPFTDGVDCGNCTRHCPVGAIQMVPFHGRHRHRGGRENSEQDKTIMIPVINTERCIGCGTCENLCPARPFSAIYVEGHEHHRIIMKNEHNKNLDRRDFLKVLGGAAAVTSATLLPGCKNKQESAYTATTDIPTDQMTYRINPSTQDRVSLLGYGCMRWPTVSNNSARDSSDDIDQETVNKLVDVAIAHGVNYFDTSPAYCKGRSERATGIALSRYPRDKYFIATKLSNFAPSTWSREASIAMYHNSFKELQVNYIDYLLLHGVGMGNGLQEFNARYIDNGVLDFLLAERQAGRIRNLGFSYHGDIKVFDYLLSRQDEFKWDFVQIQLNYVDWKHAKEVNERNTNAEYLYGELSKRGIPAIIMEPLLGGRLSNVHDHIAAKLKQRKPESSVASWAFRFAGSFPGVLTVLSGMTYMEHLQDNLRTFCPLDPLSDADKEFLEETAQQLLRYPTIPCNDCKYCMPCPYGLDIPGILLHFNKCINEGNMPSSSRDANYSKARRAFLVGYDRSVPKLRQANHCIGCNQCVHHCPQNIHIPEEMQRIDKFVEDLKQGREFMEYRTLGRTGIRVSTIALGCEGFMHKTAEEVKADFDFAIENGINFVDIYSSNPDLRSHIGFALEGRRENFVIQGHLCTTWENDQYLRTRNPQKTIASFEELLKQLRTDYLDIGMIHYVDAEKDFHTVFDHEIIEIAQRLKAEGKIRAIGMSSHNPTVASMAVKTGLIDVVLFSINPCYDLLPPNEDVDTLWAEESYTNALQNIDPVREQFYTLCEREGVGIDVMKVYGGGDLLNKENSPFGRAMTPVQAIEYALTRPGVAAVMVGCKNREEIAEAVAWSHATPQERDYTAVMTGLEKFSWKGHCMYCGHCAPCTSKIDIAAVNKFYNLTVAQGEIPETVREHYKALTHHASECVECGACEVRCPFGVKIIESMHQAAQRFGFMTTEKKQEIINRLFAEQCSCIVCNNHEIRLFHERGVKDIYRLLKEEPDFLNGSFIADKVIGKAAAALMILGGVKEVFTGVISRPALSLFQSHGIEPEYKIETEYIINRTRTGWCPLESRCKNLETPEDCLAEIDDFMNTMKNIMRTKLLLLFFALGEITASAQTDSLPNITKTSNGKLIDPIQIHEVVVTGTRNETDIRHLPMTISVIDRKQIEQSMQPSILPILTQQVPGLFITARGIMGYGVSGGAAGGMSLRGIGSGSGRLMVLIDGHPQYMGLMGHPIADAYQSLMAERVEVLRGPASVLYGSNAMGGVINIVTRQLHEEGVKTNLNLGYGSFNTLQSEVTNRIRKGGFTSLISGSYNRTDGHRRNMGFEQYGGYAKLGYEFSPYWNIRGDVNVTHFNASQPGEVTDPMIDADQSITRGMTSVAVENRYERTSGAVSFFYNWGDHWINDGYTANPDDKNNPKPYRFDSHDDMMGISWYQSAQLFTGNRLTAGVDYYRFGGKAQNRYVEGERNGEREHIVDKVQHEIAGYIDFRQDISHWLTLDAGIRIDHHSHIGTEWIPQAGLSFHLPGSIELKASAGKGFRYPTIREMYMFPPKNPDLRPESMWNYELAFAQRLLDGRLSYGINVFYIDGKNLIVAVPRAGATPLNMNTGKIDNTGVEVEAAYRIHPHWSVETNYSYLHMDNPVLGAPEHKFYAGAMFSKNRWTVSTGFQYVANLYTDVDHVQTEDFVLWNINGSFKVTEWFDIWARGENLLAQRYEINAGYPMPKATIMAGINVKFMKKYINIALCAFLSALIGISCNTRAQNSETQLSKKDNETPKVYMFKEISPENLVKIYEALNRKATGKVAVKLSTGEPGGHNFLQPALIKDLVQKVNGTIVECNTAYGGGRADTESHLKAAADHGFTAIAPVDIMDSEGETALLVHGGKHLKENYVGAHYPNYDFTIILSHFKGHAMGGFGGAIKNMSIGIASSTGKAWIHSAGKTKGNPWENLPAQDDFLESMAEAAKSVAEHCGEKIIYISVANNLSVDCDCDASPEDPKMGDIGILASLDPVALDKACTDLVRASEDHGKIHLIERIDSRHGMHTLEYGEQIGLGCQKYELVKLDMQTTTAKLYSLEYNNARTYGFSALFIAGNILLPQLCHTIHLGGPMLLPIYFFTLIGAYKYGWCVGLLTAVLSPLINSMLFGMPLPEVLPAILSKSILLAAAAGYAAYRFGKVSLLILTGVVLSYQVAGSLVEWAIAGNFFTAIQDFRIGIPGMLLQIFGGYIVLKLMTKMKKSYYFLAGMALLGLMTGCSNELDEPGVNPNGDVVRIMFEAPEALQVTRAVTGTNSAQGGLTNVDWSKYDLRYQVAVYSEDGATLLVAPQTQVVDTYGPVSFEFRLTPNNTYKFVAWADFVKQGETSDLHYNTSDFTNISIKDGLDAQLNDESRDAYFFMKNISVTQTFGEAMTLKRPFAKLRVITTDWASEGMEMPDNFKVAYHDCVRFSALNAVTGEAVGSADAESSKVYTAAIMQDETGDKFYEGGYDATANNRTLVVDYLITGDEQRAIHFSLEMLKGTAPVVTKDFTTNIPVQRNYLTTILGNLLTVGGTIDVDIQEGFKNEWIEGEEWWNPEEITPSQPAYDEQTNTYSVYTREEFAWLPTHIDDMLAATPGFTLRICNDIDMSGVEWSPIYPGSSGRTYTVDGQGHTLRNFSMSGKFGAVYEYKLGSFVLGRYNAYTGVWGKFDGIMKNLTFENITINGLAYAEFPVKDVDGEPVDHSKEFSYFAGCIGYTGGNQWSMNSKFENVHVRHIQIKSSATPSQNLGGLVGWIGSGGGSAGNRVAALKNCSATDVHLTGYQAGGLVGQVLGDRGVSFDDCQTENVYIRYSSISSSSGFIGNIGDGGINISWSAAIEINNCNPAQNVYYINDRTGEPNTTYKPQSPFYGHKNSVDVVTITPEETTEPMKEFGFHIIAFVCIVSLFVTACDKTIHQYPESEKTWVMVELNADRTPPVYYKELTYDAEGESSINDLEPVLSGNYTADERLCLRFVVELYEMPGATDDVNKGNLVERREISVERLTDAPQDTLYFCLADGNYKVLAWADYVPKEEPADWHFSTDKLDAVRANVSHKPLDNHHKNSAAGNCDFTVDSSRDDKAGPVSLSGNDASGAAADGRMVSVYMERASGRFRLWATDLQEFRKKRSAVDDLHIKIIYKQYVSVGYNVGTEMPNAFVETRTMETSPTTLTDDGTLLLAYDYVLASDRREDHVLVDVFVYDENGKEINHYQNIDVPLYRNRETVIKGPFLTKTIGSGDIGIDGDFDNEHVVVIPDMNKCNHIKRGILLIFLGILLVSLVQAQESKSPISSFSKSYPDYVVFLPEGKIDSVFYHAHSSIIPVIFKVNKYDLFPNKQLDSIVEVLSRVQKNASVRIAYLWIGGSASPEGPSKWNHKLGEYRSQALAKYLSKETGFPKDLMRVENLWEDWYSFEVALKNGAQIPNKEKVLDILGKEKDNERRKSQIIALDKGYTWHRIIRDIFPPFRNARMAIVCHERPERIPVNVERLSFDYSLPVREPVSSFPMNTAENRRRVIAVKTNLLFVAALTANLGFEAELWPHWSIDLPVWYSPYDITSTRKLRLLAVQPEVRWWPGAVMNGHFIGLHTHVAGFNVAINDKARYQDPNHALWGMGLSYGYAFSWGKDNRWGIEFNIGVGFAEYDYDAYRNRRNGALFKSGSDVYWGVTRAGVNLSYKWSFARRNKKNRMKNYILLWVCLWCAGQLCAETAVSKSLDINIVGHVLDKNTREHLPYISVVLKGTTIGVMTDASGHYFLKNLPEGDFFLETSSVGYKTERRKVSLRRGTTLEIDFEIEEDAVVLDGVVVSANRSETTRQLAPTLVNVLNIKTFENTNSNSLAQGLNFQPGVRVENDCQNCGFQQVRINGLDGPYTQILMDSRPIFSALSGVYGLEQIPANMIERVEVMRGGGSALFGASAIAGTINIITKEPLRNSGSIAHSITSIGGSGDFDNSTSLNASLVTDNNKAGIYIFGQNRQRSGYDHDNDGFTELPELKAQTLGFRSYLKTSNYSKLTFEYHHISEYRRGGDRLNRPPHEADIAEQLNHSIDGGGLNYSLFTPDEKHRVNVYASAQHIGRDSYYGTEQNLNAYGETEDLTVVAGTQYIYSFDKCLFMPADLTAGIEYNYDNLRDEMKGYNRKTRQEVHTESAFLQNEWKNDRWSILVGGRLDKHNLIDHVIFSPRANLRFNPVRDVNLRLSYSSGFRAPQTYDEDLHVAAVGGEATMIRQAENLREEKSHSVSLSADMYRRFGAFQCNLLLEGFYTRLNHVFVLEEIGKDEEHNAVIKERRNGQGAEVAGVTVEGKVAYLSLVQLQAGVTWQKSHYTRPEKWSKDSSVPAEKRIFRTPDWYGYFTATYSPVKPLNIALSGTYTGSMIVQHMKGYIPKDIAVTTPDFFDMNLKISYDFSLYKFITLQLNAGIQNIFNAYQRDFDQGKERDSGYIYGPSMPRSYFAGAKLMFMKQLLHKIARYFLPVLFISYIGCISLFTHSHVVNGVTIVHSHPYKPGTEHEHTTAEFQLIHMLSSIETENPSMWAFVSVILFSYCSRLFFPSRYFCLISEKWGAHGLRAPPVSVLMEIELRNERFSDYPETENVVREAFWNRYSPGCCEHYLIHIMRYSRAFVPQLDFVAVFDDKIVGNIVFLKSVIQADTGKEYEVLSLGPISVLPEYQNMGIGKRLIDHTRNLAKCMGFRAILLCGDPDYYLRRGFVPAETLGIRTADDMYADALHVCELYENALSDARGRYIENPVYNIDESQAIEFDKKFEPKELVVGIPSQKRFDRIVAMRRKAMPDKMNGENHSLVRLFLKSGFMKELDLTKGSVLKTLLQFAVPFLIANLLQALYGGADLFVVGWFDDAASVAAVAIGSQVMQTITGIILGLTTGTTVVIAMATGAKNYRDVVTSIGTSICLFASVGLFLTLIMVVSHNYIAVLMHTPVEAMRDAKHYLLICSIGIPFIMGYNVVCGILRGLGDSKTPLYFVALACVINIVFDVVLVGFCHLRAAGAAIATVSSQGISFLTALWFLHKRGFHFPFSRRDIRLSPILSRRIFVLGAPIALQDALVNVSFLLITVIVNQMGVIASAALGVVEKIIVFAMLPPMAISSAVATMTAQNYGAGLLLRMKRCLYSGIGMALIFGVSVCVYSQFLPDTLTGIFTKDPAVIAMASEYLRGYSIDCIIVSFVFCINSYFSGQGNSLFPMIHSIIATFVFRVPLSYLFGQIDSASLHLMGFAPPISTFVSLLICIWYIRRTNRKLEYKFRSLMGADSARHYQWYPFINLGHYHLASVSDSRISKEFGRNLRSGIERVYERAQGNPFLNGIPAIWCSNNLTVAMATQCRLYRELTGDNRYREMESSLIDWLFGCNPWGTSMITELPLWGDYPINPHTPLIALGVGTTVGGLVDGPVYSSIFDSLRGVRLTRRDPYARFQSEVVYHDDIQDYSTNEPTMDGTASLSYLLSSLQKEGMKSRGLDRNEYAYGGIVRTDAEKKQISLVFTAADKSDGARRILEVLGKCDVKGSFFFTGEFYERFPETIQTLYNAGHYVGAHGDAHLLYCAWENRDSTLVSQAQFEQDMLDVYARMRKSGIDVSRSNLFIPPYEYYNEKISAWARGLGLRLVNFTPGTWTNADYTTPDMKNYRSSESIYDRVMEVEKRNGLNGHIMLFHLGTDDKRTDKFYERYLERLIRVLQREGYTFVALPEAVGKMKYSISGIIIGLVSLLSSVSAGEWIRINQLGYLPESPKVAVFMSEGKAAVEEYVLVEVFTGEIVKRFDNPKKANTWGRMQSVYRLDFSDFKTEGTYVLRVGETMSPRFVIGNRVYDGTADFILRYMRQQRCGFNPFERDSCHIHDGYIVYHPTRNGERIDVRGGWHDASDQLQYVTTSANATYQMMFAYLKNPEVYGDVYDAYGLPGANGIPDIVDEIKWGLDWLNRMDPSKGEMYNQIADDRDHKGFKLPSQDHIDYGWGKGTGRPVYYCSGKPQVRGEFSNATTGVASTAGKYASCFALGAEILKDFYPDMADTLLVKAREAYWHGANNPGVCQTASVVSPYIYEECNWTDDMELAAVQLYVSTGETSFFTRSCRIWKIRTGYTVDGSRMTPAVVLITIFAYFIVLFGISYIVGHRADNQGFFVGNRKSPWYVVAFAMIGSMISGVTFISVPGMVAASGFSYLQMVLGFVVGQILIAYVLVPLFYKMNLVSIYEYLENRFGMSSYRTGAWFFFISKMLGAAVRLFLVCVVLQLLVFGPMKLPFLLNVIFTVGLVWLYTFRGGVKSLIWTDTLKTVCLIVSVILCIYYIATDLHLDFGGLWQTINQSDMSRMFYFDDVNDKRYFFKQFLAGVFTMIAMNGLDQDMMQRNLSCKNFKDSQKNMITSGISQFFVISLFLMLGVLLYVYAEINGIQAPQKSDELFPMIATQGYFPVIVGILFVVGLISSAYSAAGSALTALTTSFTVDILGVKGKSEDQVVRLRKRVHVGMAVVMGIVIFVFNLLNNTSVIDAVYILASYTYGPILGLFAFGIFVKKQVKDKYIPLVAILSPILCFILDRNSQTWFGGYSFSYELLILNALFTFIGLLFLIRKQTPGSTKSMKYSAMRRINAMGKQILFLLFICSISIVQAEENRVIVGAERTAEYYPLLEGKRVAVFSNHTGMIGNRHLVDVLVGEGLNVVTIFSPEHGFRGNADAGEHVSGSIDPKTGIKISSLYDGKSGRPSDESMRMFDVLVVDIQDVGLRFYTYYISMVKLMDACAEHGRMVIVLDRPNPNGHYIDGPILDMKYKSGVGWLPIPVVHGMTLGELARMVNGERWLSDGRICDLTVIPCKNYTHRTMYELPIPPSPNLPNMKSIYLYPSTCYFEATPVSLGRGTDWPFQIYGHPNMVGYTFSFTPRSVPGAKNPPLLNKKCYGVDLTRLSNEEIWEKGINFDYVIDAYRNLNLGDHFFRPFFEKLIGVDYVREMIKAGKSSEEIKAMWHDDVEKFREQRRPYLLYEEMIKYTQQSFHKNCKFMFTSIYNRILNYCNSVYKSPSSKTVKKMKEESARWFIDLLQQRYSTGTSDSPCIHTGNKCIIIMVDNTIYNPGLADKLRGILSIYSLCKEKHIDFKINWTYPFELTEYMLPNKINWIIEQEKIKYSLSDSKIVVIDTLPNIHASRQSIIDKKIFDDTVLNSQYLQYHIYTNSIIHTQAFPNLFRELFTPSEKLQSLIDLHHKNIGEKYVAASFRFLELLGDFKDSEGMDEMLPPREQKLLIEQCYIELKKFIDTLPEFYKILVTSDSERFLAKASTLPRTYIIPGKVIHIRYKTTDTSAYMKTFLDMFLLSGAESLVLFKTGKMYNSGFPRLASQIGNKPFKIHEFMSIFRKTMKALGFSGEDDEFEAQPYTAENITNACIREKERQDNESDVTPSASRVGEDKEEELQLPDTLLDTLLELLNKSLPDYILAALDKEAEKKYLFDRLDKPFKEFICAVNERARESVSRKWKTEHLNLTKEMEEARVKMKELEEQRNTMQSAQLSAERQKRAVAEKVHELEARIAALEAEKEQFELENKSLVNKLKVSNVHQEELEAASAEIERLRAELKTQKENISDVEQLRMDLQQARKELSQAKDKETEIASQLEAARQDLMQREDKNSQLLKQIKELEIQLSEAQNGLKVVDEVEIKLQQFEQIKASKDEKIAQLLDNLQSVEEENKQLQARLNDLIEQKEKLEQAVTQGNVGNKNEIESLKSDLENANAMVAALRNQRQELLAQIENLKFVKNTNEKQEPETVTPVEEKQDTSSVISFEVRQDESETKSNVKTSVEESKEVTENPPKSVDTNTGEDDFPGLDSFDDNWLIPTRPDTPEMIAKRKEEEKKKREAEEQAAVEQKKAQQVDSSQMSLWMKAGIDTKIMNRPNINQLYLKDTSFANLMQKRVFNVLLVASRYDAFIMEEDGRVEEQIYFEYVSLNLSSPPRVKQVTTNEEAFEELALKRYDLIITMPGVDCSETFTQAKAMKRLYPYIPIVVLTPFSHEVSRRIAKEDLSGVDYVFSWLGNVDLLVAIIKLIEDKMNAEVDITSVGVQLILLVEDSIRFYSSILPNLYNFVLKQSQIFSTEALNDHERMLRMRGRPKVMLARTYEEAMQIYEKYSGNMLGIVSDVSFVRAGEKDKKAGIKFCTYVRSCDPYLPLIIESSERENQKEAIKLNASFLDKNSKKLPVDLRKTILKNFGFGDFTFINPNTGEPIVTIKNLKDLQDNIDIIPDDSLYYHASRNHISRWLYSRAIFPMAEALQPRQITDLSEISEIRKLIFDAIVQYRKMKNRGVVAIFKRDRFDKYSNFARIGNGSLGGKGRGLAFIDAMIKRNPTFDNIEGVNVTVPKTVVLCTDIFDTFMESNNLYQIALSDISDEEILEHFLKAKLPEELKPDFLAFFDVVGKPIAVRSSSLLEDSHYQPFAGIYSTYMIPSLDDKNEMLRLLLDAIKAVYASVFYADSKAYMTATSNVIDQEKMAIILQEVVGTQYNDRYYPSFAGVGRSINYYPINDEKAEDGVVDLAIGLGKYIVDGGRSLRFSPRHPNKVLQTSTLDLALRDTQTRFYALDMNRGEKPFSIDDGFNLLKLSVRDAEKDNSLRLMVSTYDPVDQMIRDGYYDGGRKVVTFANILQHEAFPLASILDSMLTIGSREMGRPVEIEFAGNLVGPGNTPGTVYWLQIRPIVDMKEMLSDEVMDLPDERTILKSNTALGHGVMDNVSHIVYVKSSSFKSSNNVNIAREIEKINRTFTEREENYILVGPGRWGSSDSSLGIPVKWPHISSARLIVESALDNYRIEPSQGTHFFQNLTSFGVGYFTVNTFAGDGYYDESYLNELPAVYESESLRIVKFDAPVLIEINGRKGKGLVTKPGVEQIENKMNIEHIMTSLAAKHPGESEYLQAVHEVLLSIEEVYNQHPEFEKAKLIERLVEPDRIITFKVPWVDDNGEIQVNLGYRVQFNNAIGPYKGGIRFHASVNLSILKFLGFEQTFKNALTTLPMGGGKGGSDFSPRGKSDAEIMRFCQAFMLELWRHLGPDTDVPAGDIGVGGREVGYMFGMYKKLTHEHTGTFTGKGLEFGGSLVRPEATGYGGLYFVKQMLATKGIDIAGKRIAISGFGNVAWGAASKATQLGAKVVTISGPDGYVYDPDGISGEKIDYMLELRASGEDIVAPYAEKYGVQFFPGKRPWEQKVDIALPCATQNELDEEDAKRLIENGVICVGEISNMGCRPEAIDLFIKHRIMYGPGKAVNAGGVATSGLEMTQNAMHISWSAEEVDQRLHQIMSDIHTQCVKYGTEADGYINYMKGANIAGFMKVAKAMMAQGVVMKKIFLSFLLFCTLSTSYAKIDIERIDPPFWWTGMQDRELQIMLYGKNIADCKIKIDYPGVTLTKAVSLDSKNYLFLYLSIAPETQPGNFDIQLSRKREKQNIPYALNARTIQGKNRKGFDATDVLYLIMPDRFADGDPSTNVIPSMRFPSPVNRNNPDARHGGDLKGIAEHLDYIEDLGVTAIWLNPVLENDMPGGSYHGYATTDYYRVDPRFGTNMYYRDLITECHNRGMKVVMDMIFNHCGDQHIWFLDRPSHDWFNFPDGYRQTSYRLTPHFDPYVSEYDKSMTVEGWFVESMPDLNQHNPHLMKYLTQNSIWWIEFSGIDGIRMDTHPYVFFDSMSEWCAAINREYPNFNIVGECWYGTETGSAYWQRNSILDTSRNSHLKSVMDFPLQGITRDAFTSQTDSWGGLNLIYDHLALDFMFADPMNVLNFLDNHDTDRFLLSEPSHLGFYKQAIAFLLTTRGIPQIYYGTEILMHGSKQKTDGLVRLDFPGGFPGDTINDFLSQDRTPLQNEAFDFCRTLLKWRQNNPCLSHGEMMHFMPNNGLYVYRRSYEGKNVLVIMNGNDSPLTVDMSRYNEILSEVQSAHDIITHRQIEFSPIMEFPPRALYILEYMKKGFFSHQLCYRRSLLNKHILYLTFDNKVDNILPFQREVSLTTFCEGVLFVVSPGFEQEKEEFCRILREQLSGNPLLTVGEAIIHNPIYLRNMADDIAPCSLYTVTSINWATARLRDDELTLVKVLMKNPIWIIWLVLCLSACGSRTPDYVISEKDMEDLLVDIHKSEAVIESNYNIYNNNADKKKIREAVFLRHGVTREQFDTTLVWYGHHIETYMKIYDRVVERLKAENEEAKKLLAEENSQTMSQPGDSVDVWKQRRSHIFDSRLSTNLLAFDIAPDENFRTRDYFELKFKVVMLPKLSVNPQVYMAVRHTDNGVAYNRIDIDKGGWFSLPLQSDSVTALSRLYGYIVLPEQSVREKVYIDSLMLIRKHYNDRILDVNNQVYMPEQSVVSGESKKAVAKRVTKLKKLGSMKKLTRGQVALITIVLVLIVDQAVKIWVKTHMYIGESIRVTDWFYIAFIENNGMAFGMEVGSKLFLSLFRIVAVVFLSWWMLKIKNRPQVATGFIVCLALIIAGAAGNIVDCLFYGLMFNDPVPPLVASFVPGDGYAGLFYGRVVDMLYFPLFSFYWPDWIPWIGGERFEFFRPVFNIADSAISVGVVCMILFYHRYLSSENKQVEKSEMSEKTRYSDAELEEFRQIINEKLEKAYRDYDLLKASIMNTDGNDVTDTSPTFKVLEEGASTLSKEEAGQLAQRQMKFIQHLQAALVRIENKTYGICRETGKLIPKERLRAVPHATLGIDAKEDGKRKMGKKFTEYSRFDLSEINKEVLNQWDKQDLFHQSLETREGCPSFVFYEGPPSANGMPGIHHVMARSIKDIFCRYKTMKGFHVKRKAGWDTHGLPVELGVEKALGITKEDIGKTISVADYNATCRKDVMKFTREWEDLTHRMGYWVDMKNPYITYDNRYIETLWWLLKQLYNKNYLYKGYTIQPYSPAAGTGLSSHELNQPGCYRDVKDTTCIAQFKIKNPRTEMTAFGEPYFLAWTTTPWTLPSNTALCVGPNIDYNLVQSYNPYTGVPISVIVAKVLVRTLFNPKAEGLSLEDYKPGDKLIPWKVVAEYKGNDLAGMEYEQLLPWVNPGEGAFRVITGDFVTTEEGTTGIVHIAPTFGADDDRVAKANGIPPLMMLDKDGNRRPMVDMTGKFYLIEDLEPDFVKQNIDVAAYGEYAGRYVKNAYDAALTADDATLDIDICVLLKQTNKVFKIEKHVHSYPHCWRTDKPVLYYPLDSWFIRTTACRDRMIELNNTINWKPQSTGSGRFGKWLENLQDWNLSRSRYWGTPLPIWRTEDGSEEICIGSVEELYNEIEKSITAGLMNENPYKKQGFVPGEYTAENYDKIDLHRPYVDDIVLVSPSGKPMKRESDLIDVWFDSGAMPYAQIHYPFENKEVFDKREVYPADFIAEGVDQTRGWFFTLHAIASMVFDSVAYKAVVSNGLVLDKNGNKMSKRLGNAVDPFSTIEKYGSDPLRWYMITNSSPWDNLKFDLEGVEEVRRKFFGTLYNTYSFFALYANVDGFTFSEPEVPMEKRPEIDRWIISLLNSLIKEVDEQFAAYEPTRAGRAISDFVNDNLSNWYVRLNRKRFWGGTMTEDKLSAYQTLYTCLETVAKLMAPIAPFYADRLYTDLTAATGRDTRSVHLADFSVSCNDYIDLALEERMQIAQTMTSMVLALRRKVNIKVRQPLTTLMIPVLNKEQQTHIEAVKDLILSEVNVKEMKFVDNAAGILVKRVKPDFKKLGPRYGKIMKQLAATIASMSQPDIIEFEKNGTFTFEIDGQQATIEASDVEIISEDIPGWLVANEGNLTVALDITVTDELRREGIARELVNRIQNIRKTSGFDITDKIDVYIASNGETDLVVEEYRDYMSRQVLANTFEILGALSGEAVTELDFDTFKVNIRIVKSMKMNNLTNYHSHCDFCDGHAPMELFVREAVKEGFSSYGVSSHAPFPVQNGCNMQKEKMTAYLEEFRRLKQLYSSEIDLYIGLEIDFLDDSFNPSIDYFQSLPLDYRIGSVHYIVAPDGTPVDTDGSPERFRNYVDMYFDGDVKEVVHRFYRSSFRMIELGGFDFLGHLDKIGLNASLYCPGLDRESWYKKWVTDYLEEVASRNLLVEVNTKAWETRGRFYPNHDYFELMNDLGIRVVVNSDAHYPEKINAGRIEALYALAQAGYTNVWQFCKGNWVDVPIEDMITFCIALLLLVAGYFVYGALVEKVFGVNPGRQTPAYTSTDGIDYIPMPTWKVFLIQFLNIAGLGPIFGAIMGILYGPSAYLWIVFGTIFGGAVHDYLSGMLSVRRNGASLPELVGDELGSGVKQVMRIFSLLLMILVGAVFVVNPANLLDLLTGENTTTTMWIAIIFGYYILATLLPIDKLIGRLYPLFGFALLFMAIGIMISLFLRPDSLPEFHEAIGYTRPDSDVNPIFPMMFISIACGAISGFHATQSPMMARCLKNEKMGRRVFYGAMVVEGIVALIWAAAAIAFFNGSFDALSEFLKGKTPAILVNDISVGWLGTFGGILAMLGVIAAPITSGDTALRSARLIAADFLHIPQKKIRNRLLVSIPIFILAWLVMMIDFEVLWRYFAWCNQTLAVFTLWALTVWLAKEHKCYWLTLIPALFMTMVTVTYIFFAQEGFRLSYSVSLGIAVFVTLLLSFLFIRFLRTLSKRGAIKKMEVKAKFDHFNVNVTDLNRSIEFYSKALGFTEVRRKEAADGSFVLVYLTDGVSPFLLELTWLRDHKDVYELGENESHLCVRVSGDYNKVRAYHKEMGCVCFENEVMGLYFIHDPDDYWIEILPAKEGIALMRLIYLFHSGFLIEAEDFSIIFDYYRGGENIIEKALRRRQPMYVLVSHEHRDHYNPEILTWKNLKTNIHYIFPCEMSSLDELSGLPNIVYLDRGESYEDDRLRVNAFGSTDMGVSYLVTAEGKTIFHAGDLNNWHWRDESTEEEVREAETAYLSELYYMKRAIKSIDVAMFPVDARLGKDYMRGAEQFVGEFNVGMFVPMHFYPAVRKAESFAPIAKRYGTEFVLLSSTRDSVIIMIRELQLRILPEQAASEQSIAAYVAREQSMDIRSIKSVRVLKRSIDARQRTVMVNLKVRVYIDEFPQDDEFPRIEYGDVSGKPRAIVVGAGPAGLFAALRLIELGICPVVVERGKNVHDRRKDIALISREQRVDPESNYSFGEGGAGAFSDGKLYTRSKKRGSVERILQIFCQHGASVSILSDAHPHIGTDKLPRVIERMRNRIIESGGAVHFETRMERLIIDGDEVCGIVTADGREFTGPVILATGHSARDVYYMLHENGVELESKGIAVGVRLEHPQQLIDSIQYHNPEGRGKYLPAAKYSFVTQVKGRGVYSFCMCPGGFVVPAASGPEQIVVNGMSPSNRGSVWANSGMVVELQPEDFGARFSMFGVLAGIKFQEDLERQCYLNGNCKQTAPAQRMTDFVNRRNSFDLPRSSYSPGLIASPLHFWLPDFIAARLQEGFKYFGKVSHGFLTREAVMIGVETRTSSPVRIPRDRESMTHIRLRGFYPCGEGAGYAGGIVSAAIDGERCAEALAMQIKQSSSFDRSVMAKTKSVYFCNNCGAESPKWIGRCPVCGEWNTYVEEVVSTKSAAGGRGEFGTMEQSKVRPQRIDDIQITEESRIDLGNGELNRVLGGGLVRGSLVLIGGEPGIGKSTLILQTVLALKGQKVLYVSGEESARQLKLRAERIGGNAPDCYIVCETSLEDIFVHIRNVAPDIVVIDSIQTIATSAMESSPGSVGQVRECAASLLKFAKQTNTPVLLVGHINKEGSIAGPKVLEHIVDTVLQFEGDRHYLYRILRSIKNRFGSTSELGIYEMRQSGLREVSNPSEMLLTQNHEGLSGVAIAVTIEGIRPFLIETQALVSTAAYGTPQRSATGFDLRRMNMLLAVLEKRVGFKLAQKDVFLNIAGGIKVNDPAMDLAVISAILSSNMDMAIEAGTCMTGEVGLSGEIRPVNRIEQRILEAEKLGFKRMLIPQNNLKGFDTSRLAIELVAVRKVEEAFRQLFGMLSKNQIKRIQSLARKKGRREEGCFIAEGNKLVEDTLSVFECDLILATPSWIVSHAHESLSKIQEVDEQEMSKVSQLVTPPDVLAVYRIPEYHLNIETLKKELVLALDTVQDPGNLGTIVRLADWFGIRHIVCSPDTADLYNPKVVQATMGALARVKVYYRSLPDFLSQVDSSVVYGTFLDGEDIYHTSLTKSGVIVMGNEGNGISVKLEPYIGKRLYIPNYPVGQPTSESLNVAVAAAITCAEFRRRQIVMIGLVRHIEYLLLHNDDVFIPGLGRFTVLCDEAKIQSGGTSFLPPVRKVAFESVATGDSGLLVRSVMRAGFISWNEAVEAIAEEVESVYKHLEQGGDYGFGRLGRLVLVDGNVCFQPQENNSIENPRFGFSLLEITPREEDAEDREIPTVEAEKVRDRVYISFHRRTVRAAAVAAAIIVFLLMLSKPINTPDTTANYAGLLSAELFGQADTTTDEAVVNDFESVLGIDEMPDTIAAGEENVLETAIHDIETARNTYYIIVASLPSKQMAEKQIECFHRQGVSADLQIYETARKSRLYVASFDDFDEARRYHSRLVQEQPLFANAWIMRAGNMKNFLVLVCVVGLPFYVLSQSYYQWVERADSCIKAKDWAGAESALVSALRTEPANGQNSLLMSNLGTVQRYAGNYEAALRSYTNGLLMTPHSVTLLRNRAALFSEIDSIDRAYQDYSQILLIDDTDEDALYHRGLIALERGDTISSRADFERILKLNPASANGRIGFASLLKVMGYYPEAIEVYSQVIRVNPEKEILYVGRAEAYLFAGQYAKADKDIEKAIELAPDDPVVYVLRALGKLARYERESAKADLKRAVELGYDSKEAERLLEEEMSNHKFIYSILFSHRIILFLGIVILFSGCANEDEPEQGPVNRTVLIYMLSNNNLGSTYRFDTQNINDMLQVAASGGLNGGNLIIYRDGYDTNPQLIQIRKNESGSAEKAIIKEYPDRNSATTEVMRSVIDETKELFPAKEYGLILWSHSTGWAPGNSSLALSPARRYELPTRSFGQDGKNYMEIDELAEAIPDKQFHFILTDVCFMGGIECAYQLRNKTDYYIGSAAEVLGAGMPYSLTIPKLFDYHLDLKDVCNTIYTYYNAQSGAYRTSTVGLVDCHRLEALADSIHEIFEAHRNDAMPDISNIQHFDRQPPYICFDLQDFLSQIATPDENTGLEQALSQAILYHAATPSVMGDVSIYKHCGLSCYILGTGNTTLDRYYTTLDWYKRVYPDNNMSIFNSLQSLLAQTPEVPAPEEIAQTWQQKLSALSSLSFQQFMEQAISAILHGAVKIAIALAVFFIGKWIINRIYHFISKAFIRRNVELSLRTFLLSLIRIILMLILIVIVIGILGINTSSFLAIFASAGLAIGMALSGTLQNFAGGVMILLFKPYKVGDFIEAQGYSGTVKEIQIFNTILNTPDNKTIIIPNGGLSTGSLNNYSKEGRRRVDWKIGIAYGDDFDTARKAILELLAADKRVFDDPAPFVVLSSLADSAIEITVRVWTASENYWGVFFDFNEQVYKQFDKYGLHFPYPQVDVHMIQDNQMIRDVKPQDATAITKIYNEYITNSIISFETEPLTEEDMLSRIVQISSKYPYLVYETDCIVVGYCYAHAWKERAAYRYTAETTVYLSPAYTGRGIGTLLMQKLIEECRNKNYRALIACITDDNIASKSLHIGLGFKQVSHFKKVGLKFDRWLDVVDYELLLTPMISKWNYLPLTSNEQQIARTLGDRYPKVPALCKLLAQRGVTSAAEAEKFFKPQLSDLHDPFLMRDMEKAVVRLNRALGSKEKIMIYGDYDVDGTTAVSLVYKFLQNYYSGLDYYIPDRYEEGYGISDKSIDYAAENGITLFIALDCGIKAVEKIAYAKSKGIDFIICDHHMPDDQLPDAVAILNPKLEGETYPYKHLSGCGVGYKFMQGFAINNGIDITSDLEPLLDLVAVSIASDIVPITGENRILAYHGLKRLNSNPSMGLRGILKVCGLNNKNITISDIVFKIGPRINASGRMQSGKEAVDLLVAKDMAGALEKSQNIDQYNEDRKELDKRITEEASRILEEHIDINRRKSIVIYNKDWHKGIIGIVASRLTELYYRPAVVLTLSDGLATGSARSVQGFDIYKAVESCRDLLENFGGHTYAVGLSMKEEHIKEFTARFEEHVARHILPDQMEPQIDIDTEINFNEITPDFFTMLKQFNPFGPGNQKPIFCTRRVTDYGTSRLVGKKNEHVKLELVDSKSKNIMNGIAFNMSQHFEHIKAGKPFDICYTIEENTHNNGSIQLFIKDMRPSEMNQIRRILLFGCFFSTIFNIKAYDFEHEKIYYKITSESEATVGVDRGTTEYIGKIVIPEEVQGGDGIFVVGPGGEIIGPPVVDYSKTYRVTSIEENAFGGCLGVETVTLPESIVSVNKCAFQNCLFLVQIYCLGQVPPVCDSSSFDNVNKKDCVLYVPKGRLAAYRNAHVWKDFPMIVESDFSGIVEIQNSVRISGKEDRIIIDGITEGYVWIYDINGVLVKTLPATGERMEIRLQERGIYLVKYAGRTVKVKIMNEIIHEVLHKYWGYSQFRPMQEEIITSLLDGHDTLGLMPTGGGKSLTFQVSTLSREGICLVITPLVALMKDQVDNLRSRGIRAAYLHAGMTRREMIVTLDNCLYGRYKFLYISPERLDTELFIARIKGLPVSFIVVDEAHCISQWGYDFRPAYLKIADIRYILPEVPILALTATATPKVAEDIQRKLSFRNGQVFRTGFSRPNLSYVVRQGEDKLQQLLRILNRVPGSAIVYVRNRKRTKEVAEELRKAGISADFFHAGLNSEEKADKQQKWKADEIRVMVSTNAFGMGIDKPNVRVVVHIEMPNAPEEYFQEAGRAGRDGTRSYAVLLYARRDKATLHKRLTEEFPDKEFILKVYERVGNFLEIALGYGMDSIYEFNLKRFCTTFKYAATPVLNALKILTISGYIEFIEETDSLSRIMILVHKDELYELRESDPQTDRVLQCLLRSYTGLFADYTYIHEDLLCQRLGMNQQEVYESLLKLNRMHVLHYIPRRRTPYIVYTRERMEPRYVQITREAYEERRERMADRIKSMITYATSSRCRQQMLLEYFGEKADYECGYCDNCIERKKRETASKNSPIQIAKEIQRLLGNGAISRNEIVESLPYPENEVIESLRFLQDEGFITACEDGIHYKNKMLFYVLGEMMSLLIGKLIPGSVCGMILLFIALTLKWIRPHDVDKAASALTRNMALFFVPASIGLMHEYKILMSNWVVLLTVSVVTTLLVIVVVGVTEEQLDRKLSHKKGGEKIMSEIFSSTPFILLLVLGSYLAGCKLYRKKHIALFHPLLVAMVLIIALLSLLDIDYDTFCAGSSFISFLLGPSVVALGYALYEQIEQIRGKEIPVLTAVFAGGIVGIVSVIAICRIMGVDETITSSLQPKSVTIPIAISLSEHSNGIPSLTAVIVFGCGLLGGIVGPAILDRCHVNSRVARGLALGSAAHGLGTARAIELGAVEGAISGLAIGLMGVITSLLIPLFESIMRMLLYCRGIVTFFFMETINLIVPREWHEFDDKQLRYLFVLFDDDYSLAEIRTLCLWGSVENPREMKKFNTLIVALFIFSISSKAEQTVGTFENAYFGKNFTIEASQKNNELETVYIEVEAKSSKSAFLSVDGNKLESFKTSLELVRDKYLSWVKIAKENNVTEMDKEFDIKFPTVSIAWRGSKWWFAFDRKITMSFLILDNGKMVAIWCPKVSASSNEFIDETIYFVFECEEDFNSLLNQLNSQAILDKLLNTKNNEDLFQMVMKKVFWIILCMFFILPVIFAENMKLHYERPAEYFEEALVIGNGTMGATLYGGVKKDKISFNDITLWTGEPESENSSPDAFNAIPEIRALLDNEDYQGADKAQYKVQGHYSENYQPLGTLTIEYLDDTVGISDYHRWLDIGNATARTQYLKGGKLFTSDYFASAPDSVIVIRLKSENKEGIHALLSFDSPLPHSSQVADNEISVEGYAAYHSFPVYYKAEDKHRYDPERGIHFKTLVRVLSVDGRVKNRYSDSRIEIDGSTEVLIWVANVTSFNGFDKDPVKEGRNYRSHVEKRMKCAIGKTYDALREAHIRDYKYYFDRVKLDLGDTDDDIAALPTDKQLLFYTDCKQRNPDLEELYFQFGRYLLISSSRTPGVPANLQGLWNESVLPPWSSNYTVNINLEENYWASGTANLIEMQYPLIEFIANLSKTGRKTAKDYYGVERGWCLGHNSDIWAMTCPVGLNEGDPSWACWTMGGTWLSTHIWEHYLFTLDKEFLCEFYPVLKGAAEFCMDWLVEKDGKLVTSPGTSPENKYITPDGYVGATSYGNTSDLAMIRECLIDAAEASKVLGVDKSFRKRIKKTLSRLYPYQIGKDGNLQEWYYDWQDQDPYHRHQSHLFGLYPGHHLSVEETPELAAACARTLQIKGDETTGWSTGWRVNLLARLRDGEKAYHMYRRLLRYVSPDNYKGEDARRGGGTYPNLLDAHSPFQIDGNFGGCSGVIEMLMQSSTNKIVLLPALPESWADGKVQGICARGGFVVDMEWKNREVASLIVSSLKGGQTEICFNGVSKKVVFKAGEEKRLLMKTLFQSFSPYLTGVAATTVVFSFSSCKKENKVPPRYNIVYIMTDDHTGQMMSCYDTRYIETPNLDRIARDGVRFTNSFVANSLSGPSRACMLTGKHSHANGFTDNTTCVFDGSQQTLPKLLQTAGYQTAIVGKWHLESMPTGFDYWEILPGQGDYYNPDFITMNNDTVREKGYLTNIITDKSIDWLEKGRDKEQPFCLFIHHKAIHRDWLPELKYLTLYEDKEFSMPDNFYDDYEGRRPAAAQTMSIAKDMDIIYDTKMYREGMKSRLKKAYGRKIKRLTPEDRVAYDAVYDSITDVFFRENPQGKELVEWKYQRFMRDYAKVVKSLDDNVGRVLDYLEKAGLLDNTLVVYTSDQGFYMGEHGWFDKRFMYEESMRTPLVMRLPKGFQKRGDIIELVQNIDYAPTFLELAGVEIPDDIQGISLMSLLRGEHPQDWRSSLYYHFYEYPAEHMVKRHYGVRTERYKLIHFYDDIDQWELYDLQTDPTEMNNLFDKPGYESIIEKLKQELVELQTLYGDSIEYRLRDKKLMFLLSLVLSLRQIQNELYIEFTVIFDLYIILSKIIFFLKKIMKRIIIGLLLSAGLSGCHIYRTYERPELSGVDSLYRVPAMTEDTMSLADFSWKELFTDTVLQQLIEKGIANNTDLNIARLKVREAEALLTSSKLAYLPSVSLTPQGTIKSIEGNSPTKTYNLAASADWELDIFGRLTNAKREAKAVLEQSQAYKQAVQTQLIATIANSYYTLLMLDKQLDISRRTAEIWAENLRVMKALKKAGQTTEMAVAQIEASKLSVDASLLSLEQQITEVENSLSSLLGVVPQRIGRSTLDMQSFPDTLSVGVPLQLLQRRPDVRQSEAALAESFYTTNRAYSAFYPAITLSGSAGWTNAAGAIISNPGEWLFSAVGALVQPLFNRGQNIANLKVAKARQEEALLTFRQTLLNAGTEVNDALLQWQVARRRLDLDRQQIISLQSAVRSSELLMRHSSQNYLEVLTARQTLLDAELSAVSDRFEEIQGVINLYHALGGGYMKIKVFIDRPILAGVISVVILIIGLIGLSQLPIEQFPEIAPPTVSVSASYTGANAETVQKSVVVPLEEALNGVENMMYMVSSSTNTGSARITIYFRQGTDPDMAMVNVQNRIASAQGLLPAEVTRSGITVRKRQTSNIKALALYSPDNSFDESFLNNYLKINIEPRLSRIAGVGEVNVMGADYSLRIWLDPGKMAKYGLVPTDITTVLDEQNLEAPTGTLGAESENTFQYVLKYRGRYEDEKDYENLVIKSLASGEVLRLKDVARIELGSRTYTYIGEVNGHPGSNCMIAQTSGSNANEIIEEVDKVVAEISRSLPKGMELVDLMSSKDFLDASIKNVIKTLVEAILLVIFVVYVFLQSMRSTLIPSISIIVSLIGTFAFLYAAGFSLNMLTLFALVLVIGTVVDDAIVVVEAVQAKFDEGYKSSYLATVDAMGGITSALITTTFVFMAVFIPVCFIGGTTGTFYTQFGLTMAVAVAISMVNALTLSPALCALIMTPHVIGKGGKMSFSSRFHMAFDTAFHRIVMKYKTGVFFMFKHKWLAGVLLVIAGAGLFILMKTTKTGLVPQEDMGTIFVDVRTSPGTNLEQTKVVMDEIDRRIKGIPQVRIFSKVTGNGMISGQGASNGMFIIRLKPWDERTDDEDEINAVINEIYKRTDDISSAQIMAFAQPMIPGYGVSSGFEIYVQDQKGGTIEDLLKYTRQMIDALNARPEIARATTSFDTKFPQYLVEVDAARCKRNGVSPSEVLNVLSGYIGGNYASNMNRFSKLYRVMVQASPEFRLDTEALNNMFVRNSDGEMSPVSQYLTLTRVYGAETLSRFNLFSAISVNGTPAAGYSSGQAIQAVREVAEETLPEGYGFEFGGMSREEASSGSTTTLVFVICVVFIYLILCALYESLFIPIAVILSVPFGLAGSFLFAKMFGLENNIYLQTGLIMLIGLLAKTAILLTEYASERRRHGMTITQAAISAAQVRLRPILMTSLTMIFGMLPMMFSSGVGANGNISIGVGTVGGMLIGTIALLFIVPVLFIVFQTLQERLMPERKLPKIEENKMKQFIIAMAVLSMLSACKESQRREGTAMYKTITVEPTNRTLKSGYTATLRGRQFVEVRPQVSGIITEIKINEGDAVHKGQTLFIIDQVPYKAALETAVANVKSAEAKLATARLSAESKAELFKEQVVSEFDLQTAKNELAEAEAALAQAKAQETNARNDLSYTEVKSPVDGVASMIPYRVGALVSSTISEPLVSVSDDQEVYAYFSMSENQILDLLQQYGSLQKAMSQMPDVELTLSNGKAYVQQGKIDAISGTVDESTGAISLRASFSNPDGLLRNGGSGTVLIPTVRKNCIVIPQTATYELQNRVFVYKVVEGKAKSAPVEVFKLNNGTEYIVESGLNSGDVVIAEGAGLVREGTIIESQTTQEMRQTRISTYIDLLFCLVILPVIIMLAPVEKWIIHHTYFMLTLIVYLYALYFTYRKANIPSLFLRHKFGQVFFLIAALLIITWGLSQIPIPKDKFSTSSLDLGIRQHMRTQTVWFFFLIVTGFSLAIELTFELFRQILSKQEIEAEKNKAELALYKAQINPHFLFNTLNALYGLVLTKSDKTESAFIQFSNILKYMYAQTTSETIPVCNEIDYIRQYVDLQALRLNKHTHISFETQTDDDQAPIPPMILITFVENAFKYGTSSDIDCTVLIRIIVKNGQLLFETENTVMKEKKEKTPAIGIENCRKRLELLYPGRFNLTTVQENRQYKIRLTIRLQMKKFSCIAIDDEPLALLVITQFCERFGNLDLSTFSEPRIGLEEIKRHKPDLVFLDIEMNSINGLDIAHALPRECCFIFTTAHAQYALNGFDLDAVDFLHKPFAYERFKKAVEKAIRRIETEKVPENIVIKQEYANVTIPINDILYIEAMENYTKIFRENGGYILSRTNMKTIQEILPEENFLRIHRSYIVPIEKIEMFSKKKIKLIGKEIFLPIGRLYANHIYDTLISRNSGHIFPNSMKNTCVFLTICVLFAGCQSNKKQYYEKHLVFPEGSTIEQKVEMAAHLTPTPQQLAWQQLELTAFLHFGINTFTNREWGDGKEDPKLFNPTQLDAEQWVKTLKDAGFKMAILTAKHHDGFCLWPTATTSHSVASSPWKDGKGDVVKEMKEACDKYGLKFGVYLSPWDRNASCYGNSPEYNKFFIEQLTELLSNYGEIHEVWFDGACGEGPNGKKQEYDWDQFYKTIQKLQPNAVMAIMGDDVRWVGNEKGYGRETEWSATALVPGIYSRSDSINTVLGLKNKSEDLGSRALLEQATELFWYPSEVDVSIRPGWFYHREEDDKVKSLSTLVDIYFKSVGYNSVLLLNIPPDTRGLIHENDAKRLQELAQYISHTFATDYGKTSHEKITGKEGDSFEINITATTPVNTLLLQEDIQNGQRIEAFTVEASINGVWKKISEGTTIGYKRLVRFDDVIADKLRVTINRTRADFSILRTGIFYANPIIEKSEEAQNSVFTPQECLIGDKEAVEAIDKKIETAIYSDGLSPILIDLGKIRSIKGFCYTPVQEENTDGTIFHYNLYQSNDGKEWKGIILNGEFSNIKNNPIPQFVTFGKVLETRYLKLEPIEEINGNQKTSIAEFSVVIPMIKALFFDIDGTLVSFHTHRIPRSTVESLEKAKKKGLKIFISTGRPLTYINNLDDIKSLIDGYITTNGAYILVGDKVIACHTIPKEDVCAMMKFSDERKFPCILVGESAALVYNTTREIEEFFHRFLDLNDISGNISLSTLLQQRIIQMTPIITAEEEAEIMPCLSSCESSRWYPAFADVTAKGVDKGKGVKSVAKYCGFSISEVMAFGDGGNDTNMLKVAGIGVAMGNAGDSLKKVADYVTTTVDDDGIKRALEYFHVIMKPVLKVVIAEPSLIIRKGLLTVLKKLSTLNIEAAEVADMQQLPALLSWRRPDILIIDPGLAGISSIIQFKKSLEGLSLKCIALQHSLADASVLKMYDGVISVYDSAEQIKETFESMVQTSSEKEERQEPLTEREKEIIIGVVKGMTNKQIAEKLCLSAHTVITHRRNIAGKLQIHSPAGLTIYAIVNKFVDINDIKDSIYSREEMYKLGAYNQNNRMSDLVCDNYPVLLVMSRFGIALGFGDKSIGEVCRENGVHTETFLAVVNLLLDEGDVDDYKNVISTGALLEYLHNSHDYFLNFRLPAIRCNLLNAIDGGEKDISIAILRFFDEYVAEVQKHMRYEESTVFPYVNSLLAGVKPDMYSIAIFRKRHDQVEAKLTELKNILIKYYPASSSNELNSVLFDIFTCEQDLASHNYIEDYLFIPVIQKLEYNIERKKMRFGRVKSEMRFPFAFALTFGYICISMIQKSKRKKDVMVKILLDNGHGYDTPGKRSPIWPDGSQLFEWEFNRDIVSRIEILLKKAGISCVRLVPEKEDISLSERCKRANTIAKQSDCLLISIHANAGGGSGGEVFTYLSSHKSKSYAEIFQDLWKNHFPELRFRGCKEENFCILRESVCPALLTENLFMDNYEDCKILLSECGREKIARWHAESIQTILRRFYQLGMKKFVFTLFAVAALIACQSNNKQNQMTGEGEAVEIVGTDSTGLVDVFAYEGTVPTASGKKDSMDYLVIITQKIDSVNGVYQMTTTYITADGKSGKKINSKGKKLSHKGTKKDKAAKVYKLVPDSGSNQTVNLWVESDTTVVILDDQMNTPAKPEHYRLKTVKNKKMEKNEMIFGIRAVIEAVEAGKEIDKILVKKDLQGDLAKELFDLIKGRGFFVQRVPVERLNRITRKNHQGVIAFISAVSYQRLGDIIPSLFEEGKVPFIVLLDGITDVRNFGAIARTCECTGVDAIVLPERGSVSVNADAVKTSAGALLHIPVCRERSIHSAIRYLKDSGIKVVAASEKAVMNYTRVDYTVPVAVVMGAEDTGVDADNLRLCDEMVAIPQVGNIGSLNVSVAAGVMMYEVVRQRFSGDSVFMIKKLSIRNYTLIDELNIEFNSGFSVITGETGAGKSIILGALSLILGQRADLKSLKRTDEKSVIEGLFDISSYHLQSFFEENELDYDAKECILRREILPSGKSRAFINDTPVSVTQLKSLGEQLIDIHSQHQNLLLADSHFQLRVVDTMAGNFSLLSDYQREYRSWHELLREYARLQDENRSGREEEDYLRYQLSQLEEAQLKEGEQEELEVEQQTLQHVEEIKGELAVIQGYLHEEETGVVPLLNAALSKMKSLSRLYPEIDELVGRIESDYIDLKDIASSVDHSQDSLSVDPDRLSWVENRLDIYYSLQQKHRVSTTVELLALRDSFADKLTRIENYDEELSELRRKIEVQERRVSELVGKLSAERRKAADQISRTLTERVKPLGMPNLRFEIEISPRQQYDENGGDIIRFLFSANKNQPLQSVSEVASGGEISRLMLSLKALIAHAMALPSIVFDEVDTGVSGEIADKMAGIMREMAECMQVVSITHLPQVASLGQTHYRVYKSDTETSTATHLIKLSEKERIEEIARMLSGSSLTAAALDNARELLKRNDLKDGKKMKRNVLYFLLLLLPYLSVAQELNCRVEVNSDQIQGTNKEVFTTLKEAITEYINDRKWSTAQISPVERIDCSMLFTVKEYTDNRFVCELQVQSRRPVYNSSYTTILINFKDTKVEFNYQQYEPLVFSETSIESNLTAVINFYVYMILGVDFDSFSPMGGTPFYELAHQVVNLGQSSMEAGWKAFEDTRNRHALLSAFIEQSTAGFRQLWYDYHRGGLDEMALSVDKGRAKITDAIQQLQKVYEAAPMSVLIPLFKDAKLDELVNVYSKAPVSEKESVYETLSGIYPTENTILEKIRQTERMLKGKHIILGITGSIAAYKAAYLLRLLIKQGAEVQVVMTPSGKEFITPVTLSSLSGKPVVSEFFTANTGEWHSHVDLGLWADALLIAPATAATIGKMANGIADNMLVTTYLSCKAPVFVAPAMDLDMYAHASTQRNLDMLRSYGNHIIEPATGELASHLTGKGRMEEPEKIVEILDRFFETSKPLSGKKVLITAGPTYEKIDPVRFIGNYSSGKMGFALAEACAEAGAEVMLVAGPVSLKTNHSSIDRIDVESAEEMYRAVLSEYDRSDIAIMCAAVADYAPETVSDVKLKRTGEDRILRLRPNPDIAAELGRRKRPGQCLVGFALETNDEEMNARLKMEKKNLDFIVLNSLRDAGAGFQCDTNKVTVIGKQGEPVEIPCKPKIEVAADIVDIIGRYVSEDRMNLNLKNPLVFFDLETTGTNITTDRIIELAYVKVFPNGKTEEKDIYINPGMPIPPASTAVHHITDEMVADKPLFKDVARNIAKVFEGADIAGFNSNRFDVPLLIEELLRAGVNLDISKRKFVDVQTIYHIMEPRTLKAAYKFYCGAPLVDAHSALADTRATYEVFKAQLDRYTEEMKEEYEGKYLTNDIDSWVSFSTQNRNVDFAGRIILNEYDVAVFNFGKYKGRSVEEVFQLEPSYYSWMMQGDFPLNTKNVITEIYTRARRRFMKFIVSSTLLLSHLQTISRVINSKNSMAILDNFLFRLEGTRLSMTASDQETTMTTAIDVMEAEGEGVFAVNAKILLEPLKELPDQPLTFEIDDNNLEIFLYFQNGRYNFIGVNGDEYPTKMPMDSSAVSFSVEAQQLLNGIGCTLFATAEDELRPIMNGIFMDIFEDSVSFVASDTHKLVRFKNQGIAPGVRASFILPKKPANLLKAILPKESGKVELAFDSKNACFKLSDFVLNCRLIEGNYPNYNSVIPTNNPNRLIIDRALFVNVLRRVSVFADAALGLAKLQLKNGELVVSTENKDYSISAEEKVACNYTGDDLTIGFKASFLIEILNNISATEVLVELSDPTRAGVILPLENKENEDLLMLLMPMMLSDFMNQKNISIICIALCLILIGGYILRQNYLLEKAYKTAGIYDYIPAEESKIILEIEQVSQIDSITSRLPISRRVSPILSLWQEILSSARLPETSAITLSFSETGEAAIWYCMPRQKQKNLKKILPRLISNNYRPVCETKGSITVNHYALHNGSFLHVLFAPGVTAISFESSLFREAQQTVDKLSRREQFTHTRQTLDSQAAARLLRQIPENSHRNSGRWQGENIYLFEKKADEKVATFSNDSTATAATTTSLSETTKMEEEQSVLASEEQRRICKELAEHYRAIISLLGDDPDREGLRKTPERTAKAMMQLTRGYRQSAQEIISSAVFEHTGSRIVVVRDIEFYSFCEHHLLPFFGKVHVGYIPSGGIVGLSKVARLVEVFARRFQVQERLTAQICQSLTDTLSTEGVMVVVEARHLCMQMRGVEKQGAVTVTYDSSGKFEQEEWRREFYSLIGKNSIGMRKSLFFILLLSMIGLTNGAQAQIAVMDTSIVQYLERPETGGKVKVVQPAQLAKRVSRAEGVIKYDGNKGYAQSSGFRIQVFSDNDYRTAKNNALYKEGLIQQAFPELETYVTFTSPFWRLRVGDFRSYEEAGNALIQLKKEFPQMAREMRVVRDKIHIQIHQGFTEMRKNIVAGNWKMNTTLQEGVALAKEIDAALAGASTKCDVIIATPFTHLVSVVNAIDTKRIGVGAENCADKTEGAYTGEVSAKMVASTGAQYVILGHSERRAYYHETPEILKEKVLLALANGLTPIFCIGEVLEEREAGKHFDVVKAQVEESLFNLSAEDFGKIILAYEPVWAIGTGKTATADQAQEIHAFIRKTIADKYGKEVAENTSILYGGSCKPSNAAELFAKPDVDGGLIGGAALKADSFMGIITAFMANKTIKDNRKSSLIQWLVFLSRLIVGGTFVFSGFVKAIDPYGTVYKFQDYFSAFHLDFLSSFAMLFSVALSIIEFVLGVHLLFGSYRKSTPRLIFIFLCVMTPVTLYLAIANPISDCGCFGDAVHLSNWATFFKNVLLLIIVLFLVYRNTSLRALYNQQVQWLTGLYSLLFVFFFVYIGTYYQPYLDFRPYKIGVNIPEALAVEEPEREFVFIYEKNGERKEFLLDNLPSEEEGWVFVDRYEKTVSGQESVTPIIEDFTIYRGATDITEDIIYDENYRVLLLSPDLETADDSEVDRINELYDYCVERGYEFACVTASTPQGVEAWQENTGAEYPFYFMDKTVIRTIARGNPCVLLLKGGTILRKTSPSQLPDETLLVQPLDKLTYGQPEIYRPERRIWFIVLLYAVPMLFLLLTEKTVAMIIGRIRQWRDAHRRKKKENENNIIEMADTIAQFEHVISICRDLFVKKLKDYGASWRIMRPQSVTDQIFIKAKRIRSIETKGESKIDEGVRSELIGIVNYGIIGLIQLHLGYSDSEDITVERALDLYDKYMTETKELMYAKNHDYDEAWRSMRISSYTDLILTKICRTKQIENNNGKTLVSEGVDANYMDMINYSLFGLIKIEYGEQDDMPRSVNHVASRAKRKKILKLTRGYYGSRKNVWTVAKNTWEKGLTYAYRDRKNNKRNFRALWIQRINAAARLEGMSYSKLMGALHKAGIEINRKVLADLAMNNPEAFKAIVEKVKMPKIKTNSGAKKRFALTGTGKIKRKHAFKSHILTKKTKKQKRNLTHMGTVNTVDVNNVKALLGMKMDKKPQPQPQSNRPNKPMPAKKNDIKDQYRVNERIRAKEVRLVGDNVEQGVYTIQEAIHMADEQGLDLIEISPNAVPPVCKILDYQKFLYQQKKRQKEQKAKSTKIVVKEIRFGPQTDDHDYNFKLKHAIGFLNEGAKVKAYVFFKGRSILFKEQGEVLLLRFANDLEDYGKVEMMPVLEGKRMIIMISPKKKMIKITFPDNSVKEFESGITPLQIAESISPRLAQEVLAATVDGQEWDLSRSINADAAIKLFKWDDPEGKHAFWHSSAHLLAEALQELYPGIKFGIGPAIENGFYYDVDPGEATITAADFPTIEAKMLELASRKEPIVRKEISKADALDRFGKRGEEYKVELISELEDGTITTYTQGAFTDLCRGPHLPNTGLIKAVKITSLAGAYWRGDEKRKQLVRVYGITFPKKKLLDEYLVLMEEAKKRDHRKIGKEMELFAFSSNVGPGLPLWLPKGTQLRDRLEAMLRKVQKRFGYLQVITPHIGNKMLYVTSGHYAKYGKDSFQPIHTPEEGEEYLLKPMNCPHHCEIYKVTPRSYKDLPLRFAEFGTVYRYEQSGELHGLTRVRSFTQDDAHIFCRPDQLKDEFLKVMDIIFIIFKALKFDNFEAQISLRDPNNREKYIGSDENWEKAERAIVEACEEKGLKARVEYGEAAFYGPKLDFMVKDAIGRRWQLGTIQVDYNLPERFELEYTGSDNQKHRPVMIHRAPFGSMERFVAVLIEHTGGKFPLWLTPDQVAVLPISAKFNDYAQQVVSELAEKDIRAFVDDRNEKIGRKIRDNELKRIPYLLVVGEKEAENGEVSVRKQGEGDKGSMKIATFAENLNAEVEELLKEWMLGKKNLIKCSQGCVVLSLFTYICLIIMLRHLMKLIFKSNIIFLLLSFSSFLSVAQINTDRVMNIGRNALYFEDYILSMQYFNQVIKVKPYMAEPYFYRGVAKLSLDDFKGAEEDCTLCIERNPFIVNAYQVRGIARQNLGDYQGAIDDYTEGLRYAPEDRSFLNNKAIAEVQLKKYDEAEKSFDKLIALHPNYYNGYMSRAQFYLEKGDTIKAIDDIDKAISIDKYISGAYAQRAIIKVLHDADYDSALADMNEALRLDPKEVSYYFNRARIKYHQDDLQGAMADYDYILKLDPDNTMTYYNRGLLRMQVGERNKAISDFTKVIKAEPNNYFAIYNRALLYDMIGNYGKAISDFNVVLEQYPDFAAGFYARSEAKRKMGDMKGGEKDFMLAMDLQKKTQYEPIDENTVASNNSKKSGQAADERSESDKNINKFNQILVADAHTEYKPEYENKIRGRVQDQNVQVSVQPMYVLTYYERPDAVRQNIYYVRELEELNDTHVFSKKLLLTNAEAALLSDQVNYHFSSINDYSRLIEINPSNPLAYFGRAVDFMLVQDFSSALDDLNRAIMTSQNFTLAYFLRAVVRAKQIEYQLSAESVQSIDFQQVRSKNSKDFSLSGLPAVGNESLKMEYEMVLRDYEKVIESAPRFIYVYYNRGNLRCSQQDYRGAIADYTEAIRLRPDFGDAYYNRGLVYLKQGDTVKGTADLSKAGELGVVAAYNLLKRMSDMSTEKKLQHIVIVGGGFAGFLLAKRINPEKFRVTLVDRKNFHAFPPLFYQIASSGLEPAAICFPFRKELRKLRHVRFHMGEALAVDTQKQILTTNTGNINYDYLVLATGTTNNFFNMPELRERVYTLKSTAEAIRLRNEILFCLERACTCADPESRRTLLCFTVVGGGPTGVEIAGALGEMKKYILSREYPEISPCDMRVVIVEGSDRLLQNMSTEASTKSRQYLEQLEVEVITGHTMKSFDGTYVSFDNGDKIKCHTLIWTAGITGEPLKGIPETSIGKGRRIVTDEYNRVVGCENLFAIGDIALLTEKNYPKGHPQVAQVAIQQSKLLAKNLNRNSFETPFHYKDKGNMATIGRNRAVADLPYLKLYGRPAWFTWMGVHLVSILGMKNKIITFLNWCWYYFTYNATLRLLIRPTRYPKRNEEMKKVTSVFLCCFLFIALNYAQSGQVMTLKECIEMGIANNLSLQNKNLNVQKSKYGISENRFKLLPVINAFANFTNSPEPAVSVTDGSKYGTPYNVTKTLRYNANGGLQLQLPLYNQTLYTSITISELVNRIDLLSYEKAKEDLIVEIGKLYFLGQTTICQLQIIEGNIARLDSLRNITQAFFDNGMAMDVDVKRVEINLENMRVQYHNAQAMLNQQLNLLKYTLDLPSEYEITLTPLNPDITGNVRFNGLSDSLYELQLLDTQTQLLKKQGRIINQGYIPSLNFTSQLAYSAYTDKFKHFFHSHISNKWYESFNFGLSLKIPIFDGLSKHTKKQQANVEYRKAVLQQENTRKQLETQYTNSVSDLMNNQRNYEKQQSNYKLAEEVYLVTTDKYKEGIASMTELLQDELRLTEAQNGYLSAHYNYKIAELNLLKLTQQLDILTQMKKENSSHYKRSKKLKALRFGQYTLNAIGIIVLCYGVYEAACLFLNYKRCETSNDAQIEQYISPINIRVPGYVKKVYFTEHQFVHKGDTLLVLDDREYRIRVSEAEAALKDAENGIAILSSSLTTTQATASVYDASIEEINTRISKLQKDLTRYRNLLQRNAATPIQVEQLETELTATLAKLEALKKQKAAATSGVNEVTNRKASVEAGILRAQAALEMARLNLSYTVVTAPCDGTLGRRALEDGQFVQGGQSLTYIIPDTQKWVIANYKETQIANLYEGQKVSIKVDAFPDKEFSGHISAISGATGSKYSLVPTDNSAGNFVKIQQRIPVRIEFDELSEEDNRLLAAGMMVIIKAKLMAHTKNYPFYDWVPKPLGIIILIMLFCPIMFINGAYTINSGEMSSGLGIISEHIQYASYAGAIGMVVFAPFMQRVLAVRRPKMMLMTGFILLFWLSYICAITDSWLLLMLCSLITGFIRMALTLINLFALILYAFKIEASDIITPGAEATDPVVADKNDQAKGLTQPIIYLFFMLFAQAGNSLTAWLAYEYEWQYVYYYMMGMLMLSIVVVLSTMKYQRHLKKLNFNLRQFGDVIAASLMMMAGSFILIYGKTLDWFDNYYIRLAAILFLLSTAALIFIEGNLKHPYLKLGVFKQKNVIFASITFIMLMMINCSAMFVSVFTSISMKIDNFQNAMLGNYSLVGYVIGAILCMILSAFKVPFKYIFAFGFSFITAYAIYMYFQYQSMGLYEHMIWATILRSTGMMILYTMCAVLGSIRLPLKYMSSWIFVMLFARSIIGPTVGTAIYSNLLNERQQHYMATLSTGVDLMNPEIAGSFNQTVKGSQFMQGHSAETATTLATMQVSGRIQVQAMLSALKEITGWTIFASILFIIIVLCVRYKQPEYPGILNLKEKGAYVGKELAMKNFLFTGFIILLLSAVSCKTTEKGSMTQTQTSTSQTNEKKNISINREELNGTWIIKTAKGKTVIGDSPVEITFDLTNGRIYGNDGCNVINGTAFFENENGLRFESLISTMKACRPEVTDRTVLNALNETRSYKRADTKELSIKFCDEKGKSVMTLEKRMVDLLNGSWKVTTIDGKKITEENPTMVIDIPEAKLSGFAGCNRMFGGISLDGTAFGIAFTQVATTRMACPDMKTEQLFLSALGKVTGFYMIDNFHAALYQQPQTPIIIIEKVQMLPPTVKQFFFKLLISIFVHDYKNVLRQYRQAYTTQRQMEQYLRVITPEDLYDKELVRISERMSDLQKLIYQLRKKGLSDEAISRKLNLPLHKIQKHLDLVELDILQISRYFNMKRVMILLFAAALLATGCTSKSTVKTPGIDLSNLDTTVACGDDFYDYACGGWMKKNPLKPEYARFGSFDQLRENNREQIRLLFEELGKQKAEPGSIAQKIGDLYNMGLDSVRLNEEGASPIAEELSRIQSLSGKEAISAMIGEMHRTTSAPFFAIYVDADAKNSTMNIAGWYQAGMNMGDRDYYIADDEANSKIRDSYRNYIQKIFTLSGYSAESAAQAAATVLKVETEIAKAAFTREELRDPQAGYNVMTIDELKRQFGGLDWDIYFNTVGLDSLRKINIGQPRTLKAVNNLLETLSEQEIRDYLAFNCIDGAAPYLSDDFVNAHFDFYSKTLSGKEQIEPRWKRALDVPNSLLSEAVGEMYVAKYFPPEAKERMVQLVANLQTALGQHIDSLEWMSDETKAKAHEKLNNFYVKIGYPDKWRDYTGLTVNPKDSYYANIRRAAEFETLYSLKDEGKPVDKTKWYMSPQTVNAYYNPSSNEICFPAGILQPPFFNFDADDAVNYGAIGVVIGHEMTHGFDDQGRQFDKDGNLNDWWTSADAEQFTKRAEILASQYDNIVVLDTVHANGHFTLGENIADHGGLRIAYTALHNTFDGVEPAPIDGFTADQRFYLAYAALWAGNIRDAEILRLTKIDPHSLGRWRVNAALRNMETFFKAFDIKEGDAMYMAPEDRVIIWMISIEGLSVAFGGNTLFDNITYVINKKDRIALVGKNGAGKSTMLKIIAGLQAPTSGSVNMPKDLTVGYLPQQMNLSDTRTVMEEAEQAFSHIFELQSRIERMNTELSERTDYESEYYQELIERVSNANEQLALIGASNYQAEIEKTLIGLGFTREDFGRDTSEFSGGWRMRIELAKLLLQRPDVLLLDEPTNHLDIESIQWLESFLSTRANAVVLVSHDRAFIDNVTTRTIEISLGRIYDYQVNYSRYVVLRQERLEQQMRAYENQQKQIQDTEAFIERFRYKATKSVQVQSRIKQLAKLERVEVDEVDTSRLNLKFPPAPRSGDYPIIAEGVGKNYGSHVVFSNATFTIKRGEKVAFVGKNGEGKSTLVKCIMGEIPYTGTLKIGHNVKIGYFAQNQASLLDESITVFDTIDRVAVGDIRTKIRDILGAFMFGGEASDKKVKVLSGGEKTRLAMIRLLLEPVNLLILDEPTNHLDMRTKDVLKQAIRDFNGTVILVSHDREFLDGLVSKVYEFGGGQVREHLGGIYDFLESRKLDSLRELEQRATVSKTEKDGNISKDSASPAKSEDPKLSYGEQKEFARRLRKAEKVVADIESEIAGLEKRIAEVEEKLATPDGAADTSLYELHGQLKKQLDDVMWKWSEASEVLDKLQKMTPFLYRIAQAFYKKYGNEISRLAFVFPNRRSGIFFQKYLAEVSGKPIFSPKVTTINDLMAELSPYTLIDRISLLVTLYKKYIELRKSDETFDNFVFWGDMLLGDFDDVDKYMVDARQLFTNIHDLKEIDEFYLTEEQIEIVKRFWGHLFFPTTESDNKQQFIQLWQILFDLYTGLRDELSSRNKAYEGMVFRDVAERSKRKEALDLPYTQVVFIGFNAITEAEKIFMEYLRDIGIGDFYWDYYAPTLQDSYNKAAFFLNDNKRRFPSKIEIDEHIEQTPQIELISIPSAVGQAKQATDILQSLIDNNHLSPEKAINTAIVLPDEELLLPMLYSIPPEISTVNITMGYTLQHTTVAALMESIYQMQRRVRVSKGEPRFYHLDVKQLLGHRFIASRIGEKAYQITNFINENNRTFVSPKELGNHRLIKLLFLIPRTTDEAAAYLIELLEYLQQGENRSDSSEAGDEETPVGFSAIELEFMYHYYITVKRLRDVIAEQDIEMTVETFFRLLGKMAASISIPFQGEPLSGLQIMGVLETRALDFDNLIILSMNEGVFPVKKIAATFIPYNLRKGFGMATTEHQDSIYAYYFYRMISRAKRVFLLYDSRTDGLKSGEVSRYIYQLKYHYRIPIQEIQINCDIATFSPITISIDKRKYGIEKKLADFMQGGNSALSASAINRYLNCPLQFYLQYIEKIEQTDEVAESVDSSTFGSIYHGMMQKIYNRIKGEKEKITVTADHIDAIRKDKGLLNRYLEECFAKEYYKAPHSPEPLTGYDYLTGEIILKLIDKTLEKDRALTPFSYVASELPIHKNISIGNNRSIQLKGFIDRVDEHNGLIRIVDYKTGRERLDFKSVTELFYPSEKDRKKAIMQVLFYCKLYKLYKTPIQPLQPSIYIVRNLFDKFESFLKYDKEPLTDFNLVEKEFDLYLTRCLEDIFDLDKPFSQTTVESHCKYCDFKQLCKRMDLRDIINSIYPISEKSMDRVLSCSLELGHPKGHLLLEAGKIESDIFFIKRGIVRAYVSHEGKDITFWIGKEGATIMSLKSYVKNEAGYETIELMEDSLLYCLKRSDLYRLFEEDIDIANWGRKLAELEFLRAEEKLIPLLFTTASERYRVLLERTPDLLQRIPLECLASYLGITPVSLSRIRAKLKMLLFSKKKNGQSVDRWHFSYICIMKRGFLFVCLWLYSFNFWGREVIGTYWKPIDNTFDSIADVLELEFISTDSIYYRDSLIQELYTIARAHHKETVYLWRAKFWDARSQLKKNNSDSTIHLIDEAYQQVDSIRYVYDYMRVFHLWTIMHKNQPHVAYKNLKKISEYYARTNNLFMLAHAYIDMGNILSRLKDYPKALEYLQKADSYYKKLNKPVYRAKNQLNISNVLYSMNEEVQAEKILYKLLENPVCVEDTSFYINTLLLLTEHDVPLSKKYVSEAYRLSTEFANKRLLIQSECFMGRFYQNNHRQDSALYYYRKACRRVNIRNIDLIVPVIKNMSECFAAIQQEDSAYVYLNRYEQYKDSLDQVNSLAEIRRMESRAAIEKQELELQQAEERGRFRFVLILVVCAFILCIAALVCYIFWKKSREEKIKKQLKELENKELVTRLENEMLQNNCFKVELEYKDRELASNSLIIMEKNQVLKSLVDELEKEKDAGNIQSNTALQISNNIRMHLGTDDEWDFFKMQFVKVHPDFFVRLKTLCPSITEGELRLCAYIRTGMENKHIAQMLSLQPESVKKNRYRLRQKLNLGKESLEDFLRGIMRKEKLFHLLVLLGFTLLSMTISAQTDSRDVYGWLRYDDYNQDEYGICKFKTDAADDIQPVWPYDQARVACAGAFAEGFYYVYLYETDGYNATPYSFNRIDLSTGESTQVADYRGMPFLFQDMTYDYSTQTMYAIGYDESVYTTLLLKVNLTTGETTIAGEIGESKYVALACSYEGQLYAIDVDYGDLWSIDKFTGAATDIGYTGERVSEDLQSMEFDHETNTLYWAGYNFWGTIDTSTGAAEGISKLGNYAQVVGLYIPFKKTNPNAPAEISDLQITPGANGELSAELSWTNPSLTFGGNKLTNLTKIEIYRNEQLVHEITNPAIGEKSNWQDTGIQQNGSVVYRITAINNEGTSSTTAQAIFIGRDVPAAPSQLSLIVLDENRAKITWSTPQTGANGGWIDASALTYKITRLPDSIVVAETTTGNEYIDNSITKLNIYSYQIQAITPDGAGPTATTDRLVMGPALTVPYRCNFATDDQFALWNVIDANNDEYTWKRETTLAAAYYYYNEDGETGGDDWLVSSPIHLEKNKIYRLKFKLQSYDVGYPEKVAVHLGTGASVAEQTTLLGDYEVESNTFVEYKVILPERLESGNYHISFHCHSEPYMFILYVTDVLLEEVSEGVLSGVVTNGQTPLEGVEVTIKDSETKCTTDEKGFYEFKELEAGNYTLTFNKTGYRYIEQSDIIVEMGDTAKINTTLEELPTYSVSGKIVNSKNEPISHAKVSITGYTDYSTESGSDGTFIFPQVYQSNLYALTIERYGLSNDTLTLNVENSNIVLDDIILKDKPLPPYSLQAEIQGEQVKLEWKEPMDTRLFRHDNGIHGGRLGTTGSTVKSVYGSVFRTPTKLTGMTWFTENYLTTHHTVNIFVFDLDTEGEPTSTILYSQTNVPNKDMEWSSFEFPEPINAPNGYMLALSYEGHVGLGLDTGEGPDYPFTEKTNCFSEDYTTGKFTYTEEHDIKRSLMIRGIGILIGEDELPPATTDKKYQVWRLTAEQKDTPEQWELLTAETVEAYSYTDTNWSSLKQGFYHYAVKTVYNNGEIVSPAAFTQALTKDMYTRVTLNIKTSTPTNEAKGAQVVLTNIDGNSEHIYTGTTDASGKIVFSNIWKGTYDINISLKGFNNYTAESEDFSTENSYEKSSYVLQEYIVNPFNLEVVKTDNEQERMFKWNVSEHLFDDFETHTDFVINSAGNIGWTYIDGDGQETYGIDDVDYINATLPKAYMIFNPYATDPNIALFDSNIRPRSGEKYLASFPARPGANNDFIISPELNFNRDFILKFYAKSYTEDYGKELMNVGYSVTGNDATDFIWLNGENPIEVPMGNWTEYKYTIPAEAKYITINCVSNNIFVFMVDDIFIGVELPEGVDLNNMKENISFEVYLDGEKINTTQQSNYLFSGLNKGKHKAGVKAVFSSVTTPMTEIEFDVEEGSGIEENQLNGRTIHPNPAKETVTVSGEYDYLSIFDISGNEKSRYFYGETISVRNLPSGIYIVRIVSGSQTEVTKLVVTKMTNWIILIVAGFFESCFAFCLGKMKGVVGLEYYFWGIGFLACLALSMILLAKAIQTIPIGTAYPVWTGIGAVGTVIVGIVFFHEPAAFGRLFFVTTLIASIIGLKMVMKKVKGSDFFCGELFPESTSVEKTEALPNTYDWGDLFERLSQSRFRSKFRLTTKEIVYLKEKGEDTIARHAADFIRKRLAPAVIPNDGKQTPMRGHPVFIAQHATGCCCRGCFEKWHRIPAGRELTDEEQHYAVAVVMEWIKRQLGEMIIRFAEEKDIEQINKLLVQVNSIHHRGRPDLFKSGKKKYTDEELRKIMSDCDTPVLVAADDKDRVLGYAFCIFQQHRDSHILTDIKTLYIDDLCVDEGQRGNGVGKVIYDAVVRLAKEQGCYNVTLNVWCCNESAMTFYEKCGLKPQKVGMEMILMKKFFTTTFACVLGVMIAGILLTLLSIAALTGMAVSTETEYTAKPNTIMKLDLGIVTDRSQEDFMSVLFGNQQKTDGLDNIIKAIKTAKTNPNIAGIYIDANGSSLGVASLDRIHRALKDFKESDKFIYAYADDYTQREYLLSAVADSVVLNPVGAIDFRGLASQIMFVKGLYDKLGIEVQVLKVGTYKSAVEPYINTQMSEANREQTMAYMTPIWNHLLEQLSQDRDISVDQLNNLADTLLVTVDAKELIAKGLVDTLMYRPQMNEFLKAKVGIDKDDDLIFASINEVASIKQAPNKAKDEIAIVYAEGGIDMGETNGVNTAKLVEDLTKIQNDKNVKAVVLRVNSPGGSAYGSEQVWAAIEAIKAAGKPVAVSMGDVAASGGYYISCNADRIFANPTTLTGSIGIYGLIPNYKGLLTGKLGLTFDGVQTNKYGNFPSVSRAMTTDEHRQMQQYIERGYELFTTRCAEGRGMSIEAIKKIAEGRVWDGATALEIGLVDELGDLDAAIEWVAQKAKLDKYKTSAYPKQKTAMEQLMDELGMNVRSKIAASYLGENYKYFKALEQCQNIDPVQYRMEDIELYMYGKSVKINHWLIPISWLYGLGVEIRNKLFDWGILPAEEFDIPVISVGNLAVGGTGKTPHIEYLIELLGHKYHIAVLSRGYKRKSRGFILADDKSTAREIGDEPYQIKRKYPNITVAVDANRRRGIKQLKKQIPDIDVILLDDAFQHRYVTPLSSIVLTDYNRALHLDKLLPAGRLRESRHELSRANMVIVTKCPIDMKPIEYNIISRWLHLFPYQNLYFSTLSYGHLQAVFPDTAIGEISLKDISRKDGLMVVTGIANPAPMLQYISHFHDLREKLLYPDHHNFTSNDLNDITTRFLALKGEKKYIITTEKDAARLRSVPFDDAIKKALYFLPIHVRFMQHTGTSFDEKISDIIYKNRRSKQVKKMLRLHTLFVFLFFIFISAYGAQTYSVKGVVTSRATGEGLPFVSMGIWNTPMGTMTDSLGNYFIGNLSPGMYRIQVSSVGYKTYVSPEFRISSYDYTLDIALEESQVALSEVSVVAAPFRSSIESPIAMRVIGVQEIEKSPGANRDISKVVNSFPGVASAVGNGYRNDLMIRGGGPSENKFFLDGVEIPNINHFSTQGASGGPVGIIDADLIREVNFYTGAFPVSRGNALSSVFDFKLLDGTPDKYTFKGTVGASEVALTSKGHIGNKTTYIVSVRQSYLQLLFSLLDMPFLPRYTDAQFKVKTRFSQEHELMVLGLGAIDDMKLNTETDPEDESKQYLLNYLPTIKQNTYTLGAVYKHYSGNHTQTVVLSRSFMNNSNIKYRDNDESSTDNLTLRLKSDEIENHLRFENRSLVGLFDLTAGFNVDYAVYRNNTFQRAFTDIPKEIRYKTDLGLFKWGIFATSGYKSADDRFSASFGFRLDACNYSSLTDNPFKQFSPRLSLSYNLIGNFFLNGSIGRFYQLPAYTTMGYQEDNVLINKSRLKYICSDQAVVGVEYYINKWARLTVEGFYKKYTHSPLSLRDSIPLACKGTDYGVSGNEAASSTARGRAYGLEVMLRWFGMGRFTALASYTWYRSQFEDPATGIYIPSAWDYRHLFTLSGTYKLPKNWDIGLKFRLMGGAPYTPYDEYTSSLVPAWDATARPYYDYDRYNTGRLKTFYEADIRVDKSFYFKGVMLGFYVDLQNVLNFKYDNPPVLISTGEKYVDNDGTERYRMKYIAQQSGVILPTLGITVEFMKNLSNFNLLIIILLFSSCRQQPFTGTVHIIPYPNQIAIGTQYRPIGKNLSIYLSPESGLDKDYIEDLLSDTGVKCKFTNFKWIADLTFDIKPDTIGLEGYRLVSNDYGTKITASDTKGLFYGLQTFRQLITSQNNTLVIPFVEIADSPKFLWRALMLDEGRYFKGKEEVKKLLDEMARLKMNTFHWYLTDDQGWRIEIKKYPLLTKIGGKRDSTQIGNWNSNIYDGKVHEGFYTQEEIKEIIDYAAKRQITIVPEIEMPGHASAAIAAYPQLGTEKQSIKVPTRFGVQYHAYNVADPKVIQFIKDVLDEVCNLFPSETIHIGGDEVKYDQWKKSAQVRNFMKEQNIKTPADLQIWFTNTISHYLESKKKHMMGWNEITGVKIHDYTDFEDAASGASLAEGTIVHFWRGDPSLIKQTVKKGYQVVNSYHEYTYLDYDTAYTSLEKAYHFDPLAGITGKETDLIIGIGAQMWGEWIPTPSDMYRKLYPRIAAFAECGWTSPSNKSWKRFNQAAYKENLRWKQLYQMPIKQAAPRQHHFMQITSQQIEEIRAGKIKTFEILFNAYYPRVKSFAFGMIKDQYEAEEIAQNVFLKLWSNREKLSSDNTLSSYIFTIVQNEVYDFFREKHYSLGYQEKMLSTPQNLQYEIDSEYNIKEIKSIVNRTLQNMPPQRRTIYQMSREQFLSNDEIAKTLGLSKRTVEKHISLALATIKKNLGDFLFWLFIFFIKMQNPTPTRQELSSYFFDRCTPKISNKVERWFFKNGNSQEAKKLLFSLWEELEDTTSSTSPEEIQAAFEQFKARLLSSAPQENKSKKPNLFLWIQRIAAILILPLIIFSGYLFYQHQKEENIVWIEKSAGYGDIKHITLPDNTTVWLNAGSTIIYPEEFIGRFRQIFFTGEGHFSVAKNKEKPFIIKSNESSIEVLGTQFNLKSYSNDNRIEVALLDGSVAFCYPSTTDQEMKCILSPGEQVYYNRTTHNLEKKNFILSDYSSWKDGKYYFKNETLEDIAKQLERNFDVNIIIKNDSLKQIPYHMAFVNNETLDDILSAMNLDGYLTIKRDGKIIEIYMKRHKIHHFADIVGRCKKGIIPFLLCFVFMGYGQNISVNFPNITVERALEILRNQEGYSFSVKTNDVNLRQKVNADLQNQPIEKVLETIFQNQPVSFEIEGKMVRIIKAPEKDSKQTGSTAESKKISGRVTDKQGDPLIGVSIIAKGANKGTITNIDGYYSLTVPDKSVIQFSYVGYDTQELKLGKGNILNATLQEKINDLDEVVVIGYGSMKKSDLTGAVTSVKTEDLPMAANTSISHMLSGKAAGITSVQNSAQPGGGVTLRIRGEASTGAGNEPLYIIDGFPVGGSQVEPAADNRYSDFGSRNPLNSINPNDIESIEILKDASSTAIYGARAANGVIIITTKKGREGKPVVNYSANYGVQQIANKTEMMTAEEFMTEANKFAKEQWLYNNRVYPYGNTNPSSIKDPIVYPYEAKDIKNAGKGTDWYDLITREGMIHQHNLSVSGGTSNLKYMASFNFFDQNGVVRNSDFTRYTGRLNIEHQINKIFKYGINATQSYIKSSNVPLGTEDFENSGLINSAMSYDPTTPVRDKNGDYAQSDRMTTVPNPVSMLEIDDYTQTKRLLVNAFLQAEIIKGLVAKINIGFDDQNGVRNSYIPTTTLYGKQEGGKASKSMAQQFDRLLEATVNYNFNIAKAHKFNILAGYSYQDFNNEGFSAANSQFFTDIFKYNSLASGEAARPTVASNKSKTMFISYFGRINYNLFDKYLFTLTARVDGSNRFGENNRYGIFPSGAFAWRIKQEDFLKDVDFLSDLKMRISLGQTGNSEIGNNAFEYYTAAWQQYVFGNSINTGTAKSQIANPDLKWETTTEFNFGLDFGFFNQRLSGTFEYFKKEVKDLLGYRSLKSFMEVSTVAANIGKTQSTGIEISLKSRNFTGEFKWDTELNFTRYVDRWKERNPEDELSPWQKANDPIRAHYGYLSDGVLGIDETPPASMPNLLPGEYKIKDVNGYLRDDFGNLIPDENGNVQYTDAPDGIIDEADIVLLGTYDPGFSIGFGNTFEYKGFDLNIFFYGMFDRIVNNATRGKFSIPNIRFILNGQNMMKEISERWSSENPHSKYPSGFVSQYPQPSDYLWEDAWFIRCKNITLGYTLPQKWIRKVFSRARIFADVSNPFVITPYSGNDPETDFKAGYPNQRTYSFGVDITFMKTKNIFFSSLFLIAAYSCSLENETYDQLGSDNVMTTENDVKAAVTGIYHELRGGGWDRYNCAWGSLLTMQIGCTDECDCNWVWDKQLDFLWTAETTDLGQFYTGLVPAVTKATSLLERMRKISISAPIKRRYMAEVRCLRAMWAYDLYDLYGTVPLITDPDIALDPQKAQSYMPERPSIEWYVNFIDTELKEAEENLKPASLLAASEYGRMTKGIAQMYMLKLYMHEAGQERHYRNDEGKAMMWWNRVDSITEVMIKDGEYSLQKDYMSIWSPSNQRNSEVIFPIPNFPEGGLGNCFLAHALPADYVSQNGIALTKWGGFLVPWDFYDTYDPKDKRRNALLATYWNGKKMVDRRTEYTGKPGAVPMKYQENPSTTGQWDASEYVINRYAEVILARAEALNEIYGPTQEAKDLVHEIRERAFDNYKGSKYEKEINDITDKDAFRAHLLKERGWEFCWEGMRRPDLIRHGELISNAIARGKLMAEPKHILYAIPQSVIYENPNLKNNEGFMNKLNFKYLFPNLFLFCICMNLTACSEKNSGGDNLQSGDEIISFEPDLNTLIRNPASGWTLYDDANDYVAQANTYWNQQGAAAEKYASIFYWRSRWSELEPEEGKYAWEHDENFKALIQGALDRGLKLAFRVYIDGQDNIHNGTPDFVREAGAKGYAVHKLWDPANENNNWTPYADDPVFQEKFGNFIRAFAKEFDNPEQVDFIDAYNLGWWGEGHHVQYLNNNNKFKVYQWITDLYAENFKNVLLVVNFGTEIGFEYEKRLAIDKHDFLTRRDGIGSYWFQDAEVNIINSLFPQKAFIAEGCYWGGNSDSYQPWNTDPLYADKFKSWSDFYTQAYKDAIRGHANTLDLREATETRGWITHAKDLVKDFISNGGYRLTPIQIEYPASVQMGNTLSIKHTWRNSGVGVCPNNNKRWNYKYKVSFALLDPESHEIKQRITDENAEPSAWIKGTDKTYKTSESLIVPAGQYILAVAITDDTQNQKPGLNLAVKNGKFINDWLQIGTIQITKMKKSLFYLAATLLIATTSCSEDNNDDDPKGQESNITLYAPDDLEEFDLLYENPTRKLKFEWESDKEGATYALIFSLDEEMNNIERIDIGTEMYTSLTHQDLDDLLGKLGVGEYKRGELYWAVESENEGTLSRSEIRSMKLFRFYKPFIDPRDNEEYRVCRVFDPISEDYAVWLADNLRATTYSDGTPLGENDVKFYTPQEGEDESWTKVFGGYYTWTATMRGTRGAEEGEKIQGIAPEGWHIPTKTEWDFLINACGDPTMPATILKEKSYWDPNAGDVGMNSIGFNMAGTGYIWSIPENDVIEAFANTYFWTSTAPKDGDVYPWNPDPVNFPNQGVTYGFTLNDSGAALYPYDRNRGYSVRCVLDMNIKTSIAIGLLILLLCSNCTNDNKTNQPESTAILAERPPMGWNSWICFGTSVTEDEVKANADFMAENLKKYGWEYIVIDAGWYAPGMETLEQYESSTPHQIIDKFGRLIVDTEKFPSAKNGEGLKPLADYLHSRGLKLGIHIMRGIPIQAVEANTPIKGTSYRARDIVNTDSRCKWYFGFYGIDMSKPGAQEYYDSLFELYDSWGIDYVKADDLLSPIYAHDEIEAITKAARKRKRPFVLSLSPGPAPVENIKHLQSVAQLWRISEDFWDDWEALKEQFPLCRKWQKYICKGHWPDADMLPIGPMAQRAMRGTPRMSNFTPDEQYTMLTLWAMFRSPLMIGCNLPEIDDFTLNLITNKEVLDINQYSKGNKELFDRNGIIAWYAQSEDELTHYIAIFNTTDKDIESYTFPLQTINYIGDGHITDLWKNESMEIKNNSVSFSVPAHGVKLIKLTKMKSSHFYYIILFSFLLAACKDDGPGEKENSDNDVPSVATNTWLLNSLDNIENYSNSDPENRYDINMVRNEYESVQLVIQTDSKKRLKIERIGNNDAIEFQCRKLEAFNGKYDVLIPCDNEIEPDDKVVRAWLTFKVKSEAEAKRHKEIIRFKTDDKEYAVAISINVVNASLPETPSIASVFGINPQNFIFTGLSEEQKIEKRKAASDLLLEYRISPYFSTWLSGTMKTECFSSPYAWNDDRTWEYLADKRFSRIALPSHGLSDDELEIMLNKARETGLLNKAFFYVWDEPTKTNEYEQIKTLSDRIHRYAPEAKVLTTFYCGPTDGEHKDDLFAVFDILNGATSIYCTGVWALQDNENRSKQCKAKLKSGQEWWSYVCMSNTPGLASNSTAIGNRATMWRNYKEQNSGFLYWVVNGFASVYPLRPRPELPEGDGILIYPGESFGTNKICTSVRLERWRDGAEDYDMLVLYEKKLGRSAALSLLNNVYKSPSNYTDQSKYALALRKNLIENITEMQHHLFYRLLIISCTFFLISCQQTIECYLIPSTDKASDFYKVQPRNSGTLFLAKNEAEHIQIVFKGCPGETYKIHRNENADNSIRYSCRQIKSVYGFDDALVPIDGEQVTLNDSIAKLWITFHTAESTRPGKYEEQISIDGNGKRQKIKIDLQVYDTALPSTPSLPAAFGIIEKNLIDSASKEQTLQNKLEWAELCLDYRMNPYFSTWLANSMKHEASSSPWKWNDKRTVPFLSDKRFNRFAVPYHSLSHNELDSLLQQLKQTDLLDKSYFYLWDEPTYMKEYHLIGQYSQEIHKLMPEAKVLTTFYCGPKDGKYKDRLFSVFDLWRGDTQIFSMSAWALQANEANADTCRSLLRGNEEWWTYVCMGPGEEQPNLLLTMDGYQHRAVLWRSWKERTTGFLYWAVNAYAESDTLAFRKDLPEGDGVLIYPGQYFNSTSPVVSIRMERWRDSMEDYEYLAKLEKKIGRAKSETLFQSIYQSPEKYSKNNAEIEKFRKSILEILSKMKIITSFKIAGLITACLFAAMPTKADIGAISFKTSAAGMNALETTIGSNQMTLETWLYIDNSTGFFASNMHNDKGFALGFDGWFKFQLDGASIWIDPTSWKENWTHIACVADGSQMIVYVNGEVAGTQENTTGYNTEADGKPLFLGTAPWGNPCNCKMADFRLWSVARTAEEIKNNYQKQVEPSATGLIKNFNFAEGNGDHTANLAEPEGNQAWCMGAIDTDYSWETVAQIPTNLRTENQTENSFDILWDGTDGNTWSVELSANGQVVDTKTRLTEKKASFSNLDKKDYTVRVKAHSFMETAFSDAFSVNLSTSSAITNIHKNISIVRHNNAIQIDGIQTGKLISIYTDQGILSRQISAEHETTVLSIEGFPHGIYFISIEGYGPTFKIALMSRLFCICFFGTKIYPIFARMSKNENIINKVLIIDDEPQIRQLLARILGLEGYEVLQAGDCKAAVKQMEYSPNVVLCDVFLPDGNGVDFIKTIKKISPESEIILLTAHGNIPDGVQAIKNGAFDYITKGDDNNKIIPLISRAMEKARTNGVKNRPEKETFQQYSFNSILGQSKPLLEAIALARKVASTDVPVLLTGETGTGKEVFAQAIHHESKRNKGNFVAINCSAFSKELLESEIFGHKAGSFTGALKDKKGLFEEAHNGTIFLDEIGEMAIELQAKLLRVLETGEYIKIGETKPTSVNVRIIAATNRNLPEEINAGHFREDLFYRLSVFQIHLPPLRERPGDIRLLTEAFVQSLSEKMTHSSKTVSKAFIDMLEQQEWKGNVRELRNVIERSLIVCESDELHPEDLPIEIQNATFKEKSSNNSGFELSAMEKRHIARVLDYTNGNKTEAAKLLKIGLTTLYRKIEEYKLMEFDALGFGVCILSGIACFWLFYKCIDWFEKIMNTEILGVIAQIVLMVVLAYPIGKYISKVFKGEKVWSDFMTPIEKIMYKLGGVDPTEEMNWKQFLKALLVINLFWFFWGMILLVSQGVLPLNPDGNLGQSVHQAFNTCISFLVNCNLQHYSGESGLSYLTQLFVIMLFQFITAATGMAAMAGIMKALAAKTTKTIGNFWYFLVRSCTRVLLPICLVIGFILIIEGTPMGFDGKMEVTTIEGQTQYVSQGPTAAIVPIKQLGTNGGGYFGVNSSHPLENPTYLTNMIECWAILILPMAMVFAFGFYLKRKKLAYSIFGVMLFAYLAGVWINVSQETGGNPRIDAMGIAQDNGAMEGKEVRLGSAATALWSVTTTVTSNGSVNGMHDSTMPLSGMIEMLNMQINTWFGGVGVGWMNYFTFIIIAVFISGLMVGRTPEFLGKKIEAREMKIATIVALLHPFVILVGTSLAAYLYVHAPSFVENEGGWLNNPGFHGLSEMLYEFTSCAANNGSGFEGLGDNTWFWNYSCGIVLILSRYLPIVGQVAIAGLLANKKYVPESAGTLKTDTVTFGVMTFAVIFIVAALSFFPVQALSTIAEHFSLMKNNKSASLFEKEQVLTSLKQSFVKLNPRIMVKNPIMFTVEVCTAIMFLVMIYSIFDNAQGSFVYNAWVFVILFITLLFANFAEAIAEARGKAQADSLRKTREETPAKLLVNGQIKTTSSSQLKKGDVFICEAGDTIPADGEIINGLASIDESAITGESAPVIREAGGDKSSVTGGTKVLSDRIEVLVTQQPGESFLDKMIALVEGASRQKTPNEIALTILLAGFTLVFLIVCVTLKPFADYTGTVITIASFLSLFVCLIPTTIGGLLSAIGIAGMDRALRANVITKSGKAVETAGDIDTLLLDKTGTITIGNRKATHFYPANGLENHAFAEICMMSSLSDETPEGKSIVELARESGLRVHNLNTTGSKLIKFSAETKCSGVDLADGTRIRKGAAEAIRKIAQNASYEIPQDLENRITEISKNGGTPLVVSVNEKPAGVIELQDVIKPGIQERFERLRKMGVKTVMVTGDNPLTAKYIAEKAGVDDFIAEAKPEDKMNYIKKEQSAGKLVAMMGDGTNDAPALAQANVGVAMNSGTQAAKEAGNMVDLDNDPTKLIEIVEIGKQLLMTRGTLTTFSIANDVAKYFAIIPALFMIAVPELASLNIMGLHSPESAILSAIIFNAIIIPILIPLALRGVQYKPIGASALLRRNLLIYGLGGIIAPFVGIKLIDLVIGLFFMKNFIKSIRLTLVFCLFFSVFYILILWIFAQFAGPNSGNAEVATLDGKIVGAANVGQVFTEDIYFWGRPSCAGDGYDASSSAGSNKGPTNEEYLAEVETRIDTFLVHHPYLERKDVPAEMVTASGSGLDPDITPESAYVQVKRVAAARNMDETTVKEIVDQTIEKPFLGLFGTEKVNVLKLNINLENYENKMKTNKNISAIATMKKKQLIDKEGASLIRALIIISIIGLLAMFTNKASAQVRFNVQGDLVSSYVWRGMYQTGASIQPTLSFSVENLSLTAWGSTDFDGYRNGNIPSANKELDLTLAYTFPKLGLTVSVADMWWAGQGAGKYFDFNNKTTAHHFEASLAYVLPVEKFPLSIAWYTMFAGMDKNEKGDKNNYSSYVELNYPFSVKSVDLNVTCGIVPYKAPQYYTNGFAVTNVALKGSYAIKITDSFSLPIFSQVIWNPRMEDAHIVFGITLKPMDIIENEKNVQYFLDLIKKSRRGKFKLYIGMIAGVGKSYRMLQEAHELLENGVDVKVGFIETHGRTGTEAILQGIPVIPRKKIFYKGKELEEMDLDAILQIRPELVIVDELAHTNVEGSRNEKRWQDVMELLDAGINVISAVNIQHIESLNEEVQEISGIEVRERIPDRVLEEADEVVNIDLTAEELIERLKAGKIYRPEKIELALNNFFKAENILQLRELALKEVALRVEKKVENELPLDTSHVRHEKFMACISSHEKTPRKIIRRCARLATRYNTKFFVLYVQTPKEDPDRISLADQRHLLNHFKLATELGGEVIQVHSPHILESIIKVAIEKQITTICTGIPALKLPQTIFTVSKYKNFMKSLSENNIDLIILAMNIKTKLLLSIGLLTGMIILLVSLSVIYLQMLTAAEPDSPIASTGLKQAVVWVAIIGGICIVCGVTLAIWLPQSINRPIKELTDGILEIANRNYEKRLNISDKNEEFKNVVDSFNRMAQHLSEYRSTTLSTLLAHKKFLEAIINSISDPIIGLDPDRKILFINSEALNILNLKKENTIFKSAEEISLKNDLLRKLIRELVSPNPQKEPIKIYADNKESYFKASYIEIDNTNHDSEEPEKLGHVIILKNITEFKELDSAKTTFISTISHELKTPISAIMMSLQLLEDRRIGSLNKEQEQLSQSIKENGERLLNITGELLNMTQVEAGKLQLMPKITRPIELIEYAIKANQVQADKFNIHIEVDYDENTKKLFVDSEKIAWVLTNLVSNAIRYSKENGRVIIGTYQDGNMVEIYVQDFGKGIDPRYHQSIFDRYFRVPGTKVQGSGLGLSISKDFVEAHGGTLSVESELGKGSRFILRLKSMNVRIEESWRKRLQDEFDKPYFERLVSFVRSEYGRAHVLPPGHLIFHVFDACPFESVRVVILGQDPYPNPGQYYGVCFSVPEGVAIPGSLFNMFKEIHDDLGKPIPASGNLDRWVRQGVFPLNSVLTVRAHETGSHRNMGWEIFTDAVIRKLSDERENLVFMLWGSYAKEKIALIDARKHLVLTAAHPSPRSADRGFFGCRHFSRANAFLRSKGIREIDWMKPLLILISILFGFLSMQAQYDYPYDSGNHYYDNTPRLIIQKSRIMGWYVSDINGNRISDYYEQIRPYRQGRAAALDKIMGWCFISLDGKRCTDYYLLVDDFHEGYALVKDKIMGYCFINRDGHRLGDYYEEAYPFHRGVALVKDKIMGWYLLNTAGKRISDYHDSPRDFQPTRPLYRPWMEEIKRTEIASLGEFGLIERLTGHIQLKNTSTLKGVGDDSAVLDYQGKQTLITTDLLLEGVHFDLTYVPLKHLGYKSAVVNFSDIYAMNGTPRQITVSLGVSKRFSVENLEELYAGIQLACDIYGVDLVGGDTSASMTGLTISITCIGEGEPGKVVYRNGAKENDLICVSGDLGAAYMGLQLLEREKRVFAGETEFKPAFEGHEYLLERQLKPEARKDIVAELDKAGIVPTAMMDISDGLSSELLHICSQSHVGCRIYEDRIPIDYQTAAMAEEFNMNLVTAALNGGEDYELLFTVPLEKHDIVAAIPGVRVIGHITKPELGCCMITRDDTEITLRAQGWNSLAEEMIEKIKETAAYIAAKVQVMPKTAIILGTGLGELVDHITDKTEIPYTEIPNFPVSTVEGHQGKLIFGKLGKKDVMAMQGRFHYYEGYDMKQVTFPVRVMKELGIEHLFVSNAAGGMNPDFAIGDIMIIRDHINLFPEHPLHGRNYKELGVRFPDMSEAYSRRLIAKALEIAEKNHIKVQQGVYVGTQGPTFETPAEYRYFHIIGGDAVGMSTVPEVIVARHAGIEVFAVSVITDLGVEGIVEKCSHEEVQKAAAEAQPRMSFIMKELVEQFMEGSRNTGGCAIFVKRTEIDCSSLESIGILYLPSGYSIFMKQFLFCLTISLYGSILAVGQTTGTLTSHKFQSGGIERSYKYYQPANLSSGAPLVFVLHGYGGTADPKRFGMNPIADKYGFAVCYPQGEQDKKGKNCWNVGYPFQADMTIDDINFLCDLALHLQKNYRLSPHNTFCTGYSNGGEMCYLLAYKRPDIFTAVAPVAGLTLEWMYRELETNRPIPLFEIHGTEDKTSMWNRDPNNEGGWGKYIAVPIAVNHWAIQNRCTHEITDTIASIDSLSNHTIISHKYVNGINRNEVWLYEIKGGKHSWGEKDLNTSEHIWLFFSKFVRMFTQIKNFLVLLMVITIAFPSACKTKYPPLRIGNSIGIKDMNYERLKAMKDAGIDCIEITTGGFISTKKPKTDAEITELLTRTKLAADSAGIEIWSIHMPFGKDIDISQTDEKIRKNSVALHMKVLEFCKIIQPKIILFHPSWYLGHNERNERIAQLVRSVNELNPKVKELGAKMVIENMLGYELVRNEQHERPLGRTVEEVKLIMKQLPKNVYSAIDMNHIDNPELLIQAMGKRLKSVHIADGDGRHECHYMPNPCSGKGDNNWIKILKELYKAGYTGPFMYEVKTSEYKEFKDLYNCYQNLYQNFIDSNKMKDLKDILSHFFLAGKILEIKPLGAGLINDSYKVTTVAPDTPDYVLQRINHSIFKDVDMLQNNFYQVTTHIRHKLETKGETDIDRKVLTLIPTTDGKLYYFDGESYWRILIFIPNAKSYEAVTPEFSYYAGQAFGNFQAMLSDIPVELGETIPDFHNMEFRLKQLQEAITADPVGRVASVKPIIDELDKRADAMCLAERLHREGKLPKRICHCDTKVNNMMFDENGHVLCVIDLDTVMPSYIFSDFGDFMRTAANTGEEDDKNLDNVNFNMEIFKAFTKGYLETAKSFLTDIEIDNLPYAVTLFPYMQTVRFLTDYINGDTYYKIKYPEHNLVRTKAQFKLLQSAEAAIPKMKAYIKECLGKMNSPKGLFYAIISSSTFGLVPLFAIPALQAGIPLNSVVFYRFLFSSILLGIILCIRKTNFKISGKQALIIFGLAFLYAATSLLLTKSYLYIPSGLATTLHFLYPVLVTLLMVTFFKDKVSVSIIIATIMAIGGVYLLSGSEGGTLNSTGLALALTTVLTYASYIVGINKSSVSDMDGLKLTFYVLLSGAFIFLLNLIVNREMLTPIPSWEIGVDLILLALVPTLISDLTLILAVQHVGSTTTAVLGCMEPLTAVIMGVLFLGESCNFIQSIGICIILIAVTTVIIARNPHEIKKGLQLIPKLLHKSRVKMTNKIQEANLAMVVSKTFSGLNVNALRYLLPLWIAPLTGVTFRCVFAAVAFWIIGYWAKPETASVKDKIYLFLLGAVGIYGYMFSYLMGLSKTTPVSAAIFTSMQPIWVFILSVFFFNEKATVMKIVGILVGLGGALLCISTQKSDDLASDAFSGNLFCLVSSVIYAVYLILSNRFLRRTGPYTLMRYTFSGAAVSSLIVMAFVGYEASLTTLSLHFWPIALLLFVLIFPTVISYLLIPTGLKYLSTTVVAIYGYLILVVASIVSFLVGQDRFSWEQLGAMLLICVGVYWVEIAENNGRERKRPHSPSITMKIETGQGTIPLITLLGIWSISALNALPGLAVSPILGQMSTIFPHSSEFDIQLLSSLPSLLTIPFILLSGKLTERINNIVLLQVGLIIFALSGLLYMLSSRMWQLIAVSALLGIGSGMIVPLSTGLISRHFIGRYRTRQFGLSSAITNITLVTATVLTGYLAEINWHLPFIVYFFPVVSFFLSFYLKRDTISVAPVKVTVSGKIEVKRLVSLMLFYGLVTYLAVIVSFNLPFLMKEYHFDTGASGIIISLFYLAIMAPGFILNRVLSIFGSFTKCVSLLCMAGGMVLILLSGNEWILGLGAIFIGFGYGVMQPVIYDQTTRVATPDKVTLALAFVMSMNYLAILLCPTIIDTLQSLFHIHTQQFAFIFNLVITLLVVLGAYYRRHTFLFNDSCDSDKSLEKLMKDLNFREGDAKTSIFGSNEMLKPSPVDRIPDAPTTPEIAYQMVKDETFAQTQPRLNLATFVTTYMDDYATKLMNEAININYIDETEYPRIAVMNAKCINIMANLWNSPEEEKWKSGALAIGSSEACMLGGVAAWLRWRKKRQAEGKPTDKPNFVISSGFQVVWEKFAQLWQIEMREVPLTLEKTTLDPVEALKMCDENTICIVPIEGVTWTGLNDDVEALDKALDEFNKKTGYDIPIHVDAASGGFILPFLDPHKKWDFRLKWVLSISTSGHKFGLVYPGLGWVVWKDKKYLPDEMSFSVNYLGANITQVGLNFSRPAAQILGQYYQFIRLGFQGYKAVQYNSMQITQYLHDEIGKMAPFVNYSDHVENPLFIWYMKPDYAKTAKWTLYDLQDKLKQGGWMVPAYTLPENIQNYVVMRIVVRQGFSRDMADMLLNDIRDAVASLEKLEYPTNTRIAQDKNIEVKGSVFTHTGNRHKTKKMKKTISVSQIKQAVNEAYDLYKNNQDGKNADYIPYLANIDKNLFGISVCLLDGQIIEVGDTQYKFGIESVSKVHTAILVLRQYGAEKLLSMIGADATGLPFNSIIAILLENDHPSTPLVNAGAITACSMVQPVGNPKEKWAAIVKNITELSGSAPELIDELYRSESATNFNNRSITWLLKNYNRIYDDPDLSLDLYTRQCSLGITAEQLSVCGATIANKGVNPKTGARVFDASLSPQITSLIATVGFYEHTGDWLFTSGIPAKTGVGGGVMGVLPGIMGIAAFAPPIDAAGNSVKAQLAIKHIMNKLDLSVFSGDQVNVQMKNKMIQKIGLAITTSLLSWNISFAQTIDSYIPSQKNIEARKEFQDNKFGIFIHWGIYSMLAQGEWYMTNHNIDWREYEKLASGFYPSRFNAAEWVSAIKASGAKYICITSRHHDGFSMFHTQQSDFNIVDATPFKRDILKELADECHKQDIKLHLYYSHIDWRREDYPAGGNTGKGTGRPNGHGDWPSYYRFMNNQLTELLTNYGPIGAIWFDGVWDRPSNFDWQLKEQYDLIHKLQPACLIGNNHHRDVYAGEDIQIFERDVPGENTAGYSTQAISALPLETCQTMNGMWGYKITDQNYKSTKALIHYLVRTAGRNANLLLNIGPQPNGELPALAIDRLNGMGKWLSEYGETIYDTRGGDIPPHSWGVSTRKGNRLFIHILDLKENGLYIPLKAPIKKAMKFSNQAPIEFKQDKDGTLLKYPQIPNEIDYIVELVLKMFYRRIIYEERKMGKNIIGGWRNYESRIYGILHILILLLSVFLIITISIDTFRNISFLNQGNYMEIQLWICSFFMFDFLLEFVLSDHKWKYLRNRFIFFLVSIPYLNIFSYLNLNFSSETYYFLRFIPLVRSGYALAIVVGWLSYNKISSLFISYVTMLMATVYFSSLIFFVLEHAVNPMVTRYTDALWWAFMDVTTVGSNIYAVTATGKILSVVLAALGMMMFPIFTVYVTSLLQKFNAQDKETQKPMANIGKSVKLGVFTLAIMNVTAVVSLRGLPAEAEYGVSSAFYYLFAALVFLIPTALVAAELAAMFQDKQGGVFRWVGEAFGKKAGFLAIWLQWIESTIWYPTVLTFGAVAIAFIGMDHTGDMLLASNRFYTLAVVLFIYWLATFISLKGLGWVGKVAKIGGLVGTIIPAGLLVILAIVYLLMGGKSQMDFSGNFLPDFTNFDNLVLAASIFLFYAGMEMGGIHVKDINNPSKNYPKAVFIGSAITVLIFVLGTFALGIIIPQKDINLTQSLLVGFDNYFNFIKASWLSPIIAIALAFGVLAGVLTWVAGPSKGIFAVGRAGYLPPFFQKTNKIGVQKNILYLQGGAVTLLSLLFVIMPSVQSFYQIMSQLTVVLYLIMYMLMFSAAIYLRYNMKKTNRPFRIGNKGNGLMWFIGGLGFCGSLLAFVLSFIPPSQISVGSNAVWFSVLIIGALIVVIAPFIIYSSRKPSWTNSDSQFEPFHWEETTPNTPTSSPANESNETSPGKMLKKIIDFYRALPPAERPVSLTDEEAVKLTKKLRLQSFFAGTLGYSLYYVCRTGLNVVKTPIVESGMLNDQQLGIVGSALLFAYAIGKFVNSFMADHSNIKRFMATGLIVSSVANLIVGLLGMTSGLAGLSSMAFFVCFFIMWAINGWSQSMGAGPAIIALSRWFPPKERGTYYGFFSASHNLGEFLSFIFVGSVVGWLGWQAGFVGSFIAGAIGVVIIIFFLHDSPESRGLPHVGNPPKESTNKAQKGVLKNPYVWILALASAFMYVSRYAVNSWGVRFLEMEKGYSLELATTVIGINALLGIFGTVLSGWFSDKFFKGKRNMPAFIFGVLNTIALTLFLLGGDSLVLNVISMILFGIAIGVLICFLGGLMAVDIVPRNATGAALGVVGMASYIAAGLQDVISGTLIENFKVVSDGVVTYDFLPVSIFWIGASILSFVLALFVWNVKPAEMKSIKGKLYVYITVSLPFGNVSILIGKKYFYSSFFHYICIRNETKTIMKLKRIEAIFTPPASHMVGDGFKVHQFIPSVKGLDMKRMDPFLMLDYNAKQHVEASSKPKGVGVHPHRGFETVTLAYKGRIAHHDSAGNAGIIGEGDVQWMTAASGVLHKEYYEEEWAREGGDFQMVQLWVNLPRKYKEEKPRYQALASNDFERVYLSGNNSYIEIIAGEYAGKKGKAMTFSPIHLMNARLTQGDKAEFSFPKDYTTFLLVIEGNIYINESIDVKADHLLLFAYEGEAFSITASKNSVVLIVSGEPLKESIAAYGPFVMNTQKELIQAFEDFNKGKYGILNDMAKVKKKSTKKKNDESSIYSGVAINIADDCKTSKKMVKDWTKIMNNNANSSPLYNDPQEKNKMSMNTRLLLITFLCVFSIGQCIAQTWYTGKDNFRQAIFQDSILSDYNYQAEKDIVNVTETDIHPGEGFRPSLSLDIANRNNRENKKYPVYRQSQTGTITKAGYVEKTVWGVVWGYGDSSNFHALLLRAGNPDPYGYHIPELQYSIITVAEGDTIFHAPWNTLSSPYINPETDYNRIHVVPVNGGYEIFIGKERECRIGICHDDRLFGSSAGVYIGSGAKIKMKNWSLSPVEYIERKVFLTADKLYEYLNISTNEIEGFYEPLQSVSASDNIRLGGNYQLAAISTQQHILLLYVNGAQRFQDQWETGMIKAILKPTGLVNIFNVTWFDAEHKPLKDGVKAVILSNHIISIYFDKEGVTLKWAQTGNKKEFDTPFHYSMYRDILYNTTLIPSFFISSLMRIICNVLIFKYYIKNRALWSIPVFIKKVNDMQVFLFISTIFVFMVGTILLANVLNVSAQGTTRKIITEKKTSQGRMVDPQSEVITAPQIAELEVSQTKCDTTFRFDHDGTVDLQNARALALSAFQKHHDADIIVGALMNTRMTAQYIEVNIEGFPARYSKIRPATREDLWMLDFINYGNKSKNTDAIKKMKKLLFLSFCLIWLPLFSSAQIIQGESTTTQTLFVPEKKIPEKGYPRYQGDIYLGYAGDDICLSLTTTHGIRINKYLFAGAGIGIEYGDLWFYHDRYKDWLCETSNIPLFINLKGYYPVAKKIEPYVSLSLGYAYNIDEYSGFYCDASIGIRLWKFCVGIGFIHHECTGLTGEDYYNNTFEDELWTRNKFQVKIGFQWMAKELKDLTKRADNYSQWYNDLVVKADLAEQSAVRGCMVIKPYGYAIWEKMQRQLDDMFKATGHVNAYFPLLIPKSFLSREAEHVEGFAKECAVVTHYRLKNAADGSGVVVDPSAKLEEELIIRPTSETIIWNTYKNWIQSYRDLPILCNQWANVFRWEMRTRLFLRTAEFLWQEGHTAHATREEAETEARRMLDVYADFAENFMAVPVVKGVKSANERFAGALDTYTIEAMMQDGKALQSGTSHFLGQNFAKAFDVQFINKNNELEYVWATSWGVSTRLMGALIMTHSDDNGLVLPPKLAPIQVVIIPIYKNAEQLQAIDAKANEIADKLRVMGISVKYDNADNKRPGFKFADYELKGVPVRLVMGGRDLENGTVEVMRRDTLEKETMSVENIEQVVKTLLDEIQANIFQKALKYRQEHTITVDSYDEFKEKIEEGGFILAHWDGTTETEERIKEETKATIRCIPFDGDTTPGVCMVTGKPSARRVLFARSYMRKIVFILLAVVICFSPVGVSSQNIFQKAANKISSWFSGGEKERASDKTGHIDITQLTLDENLSIPDLGKQARKIRTAQSREMKRLQKARLSDLKLIRNYEVLKATLSASNLFLPNDTVLSDRADIYLRPFLAALRVPDFYHVMLVMHSDDTGSEAYSLDLTRARAHAVRDWFTRNGGNTDFVVIYEAGAFDPIASNETLEGRARNRRLDIYLIPGEKMVDMARRGELDKRMSQEEDLFAYDEDDAVRYILNVLPQELKEKYTHDDIIYVTDVVYDYYDQKGLFDEQAGEEVELDEEDIIAFACKSARKDGVKIEDEDMPFLVRGELDYEESLGVFMQCTIKLIHTNSITLQIVNAMLQIENLEFSYHKKGNPIFNGINLTIQPGSVYGLLGKNGIGKSTLLYMMCGLMFPHKGSIRFDGIEVKRRLPETLEKIFLVPEEFDLPSISIDDYVRRNSVFYPNFNIDQFNQYLSDFELENTKNLAKTSMGQKKKYLVSFALATNTPLLLMDEPTNGMDIPSKSQFRKVIASGMNEQKSIVISTHQVRDLENMIDHITILDNGLLLLDADTHTISSRLRFIKGGNESEIAGAFYKVSTIAGYSAILPNETDEESLIDIEMLFNCTIGDPEVIHNIFNSSAKMKETDIIDPVRIGKFSLGYFRWSVTAHIFQPKRFWKYCTKQVYEWKRGLSLQFISLTGIYTLLMFIFHTDGQPFITSSGAQMLIWFGFFIYIAKSSSSLADQIGIRSKRVVYLTVPVSTAEKYIAHLLSTIVLYPLLFFAAIVVAQYASELISSTIRGEMFNPGTPLQDCFSMWKNSGFTTIFFVTSVLSTIATFTLGATLWQKNSFLKTVSALFLFSIVFSFSCSLFLTNEEIGSAVSYLFIGKFFDNSSNFFWLINTVQIAETIILGYIGYLRMKELEINETKRMQFKENQTIYLQIAERISDEILLGHYAIGSRIPSVREYAALVEVNANTVMRSYEFLQTQSIIFNKRGIGFFVSPDAKIKIKSYRRNEFLKNELQRFFIQIYTLNISMEEIDLMYKQFIDKLNSKTSNAQLMKRSTIILIIFLVLLIITPIVIVKTVNNLSPESKLKGIQTLWNKSDPNTPTRYIITEEYFGSDSIGTTINITTDADSKSTLIDNHRYDEDTIRISGNAHSSYNIIYEEEVNLIIENKNPNIKFKIANANLSKISLNSSGETDIVSSNLGTLIFQDSINTAPIRLLQNNIGGLIALSCTNRPMEITENNIGTAIFPEKYRDFSLVNNNIGVNTWSNEYNITIGSETNNDSAETHGTFKMKINVKTDEMKRVFKLGILLGFIFSLCTAAQAATTACKINGVVTDSISGEAIPFVTIGIENNEGKVLSRIASDALGKFMITASTGQNYRLVVSSVGYGTKYVDISLSENEKNKDLGTIKLTESSELSEVTVVAQKPLIKSDIDKITYDMEADPDAASNNALDMLRKVPMITVDAEENIRLNGQSNYKVLVNGKSSAVMSGDNVKEVLKSMPANTIKNIEVITNPSSKYEAEGVGGIINIITVSRRETNGIVGSVGANADTYGGFGGNVYLSSQIGKFAFSGRYSGSRYTNGDGGHSKAFMETFANDEFYRSEVYGSSKYRGAGHNMSIEASYEIDTLNLISFSAWGWLGNNKSTNDLNQTYFNRSNAPSSQYRSLGSSSSDYGSVSGTLDYQRSFAKKDRTLTASYQFEYNPNNSDYTTENQGILHSENYIEKSKNKAHGTEQTIQIDYFDPLTDMHQIEGGVKYIMRCNVSDGDRDKSIWDETTEDWKQTPLPVNDLDYTQHILGVYAGYVLKVKKWSGKVGARLESTWNDGRTTNYDITETPQKTKFDNNFFNIVPYVTLSWQPRDMQTFKLSYTQRLSRPGIWQLNPFKDSSTPMQLVYGNPNLESEISHTFSLGYTLFTAKGLNLATELNGRIQNNGIEQTIFMDEDGVANVTYDNIGKARECNLNVFFSGNIIPTLSLYTNLSGGYGDYSSKSAGYSNKGWNYNGYLGARWNAWKDGAISANVGYYSGFRMLVGTSAPMAFCGFSVSQSFFEKKLQLNLSVSDPFSKERKFTMHIKNDAYRIDNYNYDPCQYVRLGVTYRFGQMKESVKKARRSITNDDVKSESSGGAGGMGGGANIQMIQEDFEQHVVKLQNALLGFAKSLTHNEDEAKDLLQETSLKALSNKAMYDDSGSIKSWLYTIMRNLFLNCRRHSSRQESLPTDFEIPDTDDMQGGIEGEDSFSTIDVQRIMDLLSIDNRILFGLYLQGYRYDEIADRLQMPLGTVKVRIYRIKQELRTYKKQLVMPGDYTIVKRDEMKILKKIDIYIIKKFLGTYFFAIALILAITVMFDINEKLDSFLKAPLSATIFDYFFNFLPYFANLFSPLFTFIAVIFFTSKLADNSEVIAMLSSGISFKRLFVPYMVSAAIIAALNLYLSCYVIPPANVTRIEYMNTYVKNKRVDYASNIQLQVEPGVIAYISRYDNSNKTGYRFSLEKFDKKVLQSRLTAQTIHYDSAYHWRVNNYVIRNFNGMREELIKGSTLDTIVPIEPSDFLISQNDSEVMTTPELRRYIIRQKERGVANIKNFEIEYERRFAMAAAAFILTAIGMSLSSRKVKGGMGINIGIGLLLSFSYILFSTVTSTFAVSGATSPMLAMWIPNIIYTVIAIVLYKKAPKMDFELVHTDECTHARAGVITTDHGKIQTPIFMPVGTVASVKAVHQRELRDDIKAQIILGNTYHLYLRPGLDILRQAGGLHRFNGWERPILTDSGGFQVFSLSDRRKLTEEGAHFRSHIDGSKHLFTPENVVDTQRIIGADIMMALDECTPGDADYDYAKKSLALTRRWLDRGWKHFCETEGLYGYKQTFFPIVQGCVYPDLRIEAAKHVADLGADGNAIGGLAVGEPTEKMYEMIEVVNEVLPQDKPRYLMGVGTPANILEGIERGVDMFDCVMPTRNGRNGMLFTRNGIMNMRNKKWADDFSPLDPEGTSYVDTCYSKAYLRHLFISEEILAMQIASIHNLAFYVWLTQEARCQILAGTFKSWKDEMICRVTTRLMSVLFTRKNNTNEKTEKLIDNICSKKLKTVSLLYSGTKIMQGEYRTKFILALLGHACLGLSSKKCELLSEANDGQNQINLIFTKNDKTHRMLTPRTIIVFLCWTCGLSFFCHTAYAQSSTPPPMRPGNGSELEIKGGELSWPRTEQLPSSTPNDRFMQKKLNEHLESASLNIMRPSTMFPENPSEFMLNVILLHAVKDSIASLHDETIARMVDMFVLRNLLRPLSNDKPAPVNSWSMSAPNTMPFGIGVSYVGLLDPVEIYRNWQRKKRALRTKMVLMTLFGNTTRPLTKHETDSIKRSIEWKRNVPVSTIANPVQISTLLKNDTIVEPSKPKFTAPLFGKERPQMAIDTISAASSPKINETRMNFDNFTIKSQEAIQKAVEIVRNHNEQSIEPVHLLKGILQVGESLTSYLFQKLGVNAGLLNNQVDREIESLPKVNGGEPYLSREANDALQKAIDYSNKLGDQFVALEAMLMGLFLVKSPASAFMKDAGITEKELGAAIDELRKGKKVTAASAEDTYNALSKYAINLNERARNGKLDPVIGRDEEIRRVLQILSRRTKNNPILIGEPGTGKTAIAEGLAHRIVRGDVPENLKSKQIFSLDMGALVAGAKYKGEFEERLKSVVNEVIQSEGEIILFIDEIHTLVGAGKGDGAMDAANILKPALARGELRSIGATTLDEYQKYFEKDKALERRFQIVMVDEPDEMSSISILRGLKERYENHHKVRIKDDAIIAAVQLSERYITDRFLPDKAIDLMDEAAAKLRIEVDSVPEALDEISRRIKQLEIEREAIKRENDTEKLQQLAKEIADLKEEETKFRAKWQSEKELVNRIQQNKIDIENLRFEADKAEREGDYGKVAEIRYAKIKQKEDEIHATQQKLHELQGDKAMIKEEVDAEDIADVVSRWTGIPVNKMMQSEKDKLLHLEEELHKRVVGQNEAITAIADAVRRSRAGLNDPRRPIGSFIFLGTTGVGKTELAKALAEYLFDDENMMTRIDMSEYQEKFSATRLIGSPPGYVGYDEGGQLTEAIRRKPYSVVLFDEIEKAHPDIFNILLQVLDDGRLTDNKGRLVNFKNTIIIMTSNMGSALIRENFEKMTPANKTEVIEKTKEAVLNMLKQTIRPEFLNRIDETIMFTPLSEKEIEEIVSLQIDNIKKMLEKNGVTLEITPKALGLIAAEGYDPEFGARPVKRVIHRLILNQLSKDLLAQKVDRSKPIIVDTENDQIVFRNMKKAIVSFALVLVLSMSSFAGNKEKNERREKCEFPCEQMVKDLNLSEKQLSQLKEADKTFDTEVKAIREKKKEFEKSNRESMKAAKVRRDSTFKSILTKDQYIQYLEQKVARLEKRAARDSWRERFRAPFMGKDMKQGRLNPLPWSEKNVEKMKRLFLFFLLIGYWSVVRASDTVFIKEAQVPILIERQDNLLFYLRFDARDSRMLDGVTVDLSRCKNLDDIQSVKLYYGGTEARQEEDKNRFAPVSYISSFSPGKTLSAYPSYSIKCAEESNVSESVVLKCNYKLFPGVNFFWVSLQVKPGTSLLSKVTADLSSVTIDGKEAVCKKMSPDGIVHRMGVGVRHAGNDGVSAFRIPGLVTTNKGTLLGVYDVRYNSSVDLQEHVDVGLSRSTDGGRTWEKMRLPLSFGETGGLPAAQNGVGDPSILVDTKTNTVWIVAAWTHGMGNQRAWWSSQPGMEKSYTAQLVMTKSTDDGKTWSKPIDITGQVKDPSWYFLLQGPGRGITMQAGTLVFPIQFIDSTRIPNAGIMYSKDRGKTWNIHNLARTNTTEAQVVEIEPGVLMLNMRDNRGGSRAVAITEDLGKTWTEHESSRKALQEPVCMASLIHVRAEDNVLGRDILLFSNPNTKKGRNHITIKASLDKGLTWLPENQVMLDEDEGWGYTCLTMIDRETVGILYESSVAHMTFQAIKLKDLIREMLQPLAERLRPKNLDEYIGQEHLVGPGAVLRRMIDGGKISSFILWGPPGVGKTTLAHIISQQLQAPFFTLSAVQSGVKEVREVIDRCKANIFSKVRPILFIDEIHRFSKSQQDSLLGAVEYGTVTLIGATTENPSFEVIRPLLSRCQVYVLKSLEVKHLQLLLDRAIHSDTYLKERDIEVKETDALFRYSGGDARKLLNIIDLVSQAVGENEKIIIDDAIVTERLQQNPAAYDKNGEMHYDIISAFIKSIRGSDPDAAIYWLARMVEGGEDPAFIARRLVILASEDVGLANPNALLLANACFDAVQNIGWPESRIIMAETTIYLASSPKSNSAYMAINQALETVKATGNLPVPLHLRNAPTQLMKELEYGKNYKYAHDYTGNFVNQQYLPNELKDNNWWKPQDNVAENKLKDHLNKLWKDRYKMKKHNFYAGPSILSEYTIKNTADAVLNFADTGLSLLEISHRSKEFTAVIEEAKTLVKELLEVPAGYDVLFLGGGASMQFCMVPYNLLNRKAAYLETGTWAVNAIKEAKLFGEVDVVASSKEANFSYIPKGYTVPDDVDYFHFTSNNTIYGTEMRFDPDVNVPLVADMSSDIFSRPIDVSKYNVIYAGAQKNLAPAGVTIVIVKEDALGHVDRAIPTMLDYRTHIKKGSMFNTPPCLPIYSALQTLKYYKEMGGIKEMEKRDLEKAAILYDAIDSSKIFVGTAAHEDRSIMNVCFVMKEEYKDLESEFIEFASSQGMVGIKGHRSVGGFRASIYNAMPKSSVEALVATMKEFEKKHMKVLVATEKPFAAVAVNGIKEVLDNAGVEMVLLEKYPDKAALLKAVEDVDGLIVRSDIVDAEVFDAAPKLKIVVRAGAGYDNIDLNAATTKGVCVMNTPGQNSNAVAELVFGMTILMIRNHFNGTSGTELKGKKLGIHAYGQVGRNVARIAKGFDMEIYAFDPYCPDDVMKKDGVTPVASAEELYKTCQFVSLHIPATAETKQSINYSLLSLMPKGALLINTARKEVIYEEDLARILEDRTDFHYVADVAPTIADTLKEKFGNRIFFTPKKMGAQTSEANINAGIAAARQSVGYLKDSIDKFRVNKMLDRIKTVRWQSITETLLNAFKRFPVAATATIGLCISLLLLVNLPYEQVKGSILYEPVYWYVWVGALPLAVSIVLGFENRLNPTIRHSVSLLAVLLWSLYGYLSNDTPEHFFGTLAFIAPIVTFFSALFWAAFLKKNTDTSFWNFSYLLCIQILTGLLFTSVLAAGLSLALFSIDTLFGCEFKSEMYSNIHVLCYTLFFPFYLLGNIPIASTTETKVRPFAQAWKILGLYILLPLLILYGTILYAYLIKIIIQWQLPDGWVSALVSILTIGGAITLFMLYPLCPQENRPLKFFRQWFGILLLPLLILMTIGIIRRFQDYGITTNRLYVLLLNFWCYTTALYTIFTSGKKIKIPFISFILLFLISSIGPWRFSEITRYTMHKRIDTLIQNNKLGTNNLLTFDSLETQCTQLDSIDATRLQDDLLYLTENYGAKDIQVWFTDSVSSMQFSKLTQGITSALNRSQENHRIYFSYYQSDSYEGKNINIKDYQYALFFDENSNIRTNNGNVEILGPDSTVVAVYPLVDLLKKQNYKVNPNDTVWSFRGNNTYILPLSLDGYMNNPQEIGGLYIKGIVFYNPMKKYLAEMVGTMVLVLMGCGSAVFAGNIAAACGAGVGTLGVAMAFGLSVIAMAYTIGGISGCHINPAITLGVWLSKRMNGKDAAMYMVFQIIGAIIGSSIIYALVSTGGSSGVTTTGANSFGDGEMLQAFIAETIFTFIFVLVVLGATDEKKGAGNFAGLAIGLTLVLVHIVCIPITGTSVNPARSIAPALFAGGEALSQLWLFIVAPFFGAALSAMVWKGLMGDNKEMKITEITNGIHYVGVNDRCKYKFENLWPLPYGVSYNAYLITDKKNVLIDTVDAAYTDRLLDNIAEIIGDGKIDYLIINHMEPDHSASIQFIRQKYPQMTIVGNVKTLEMVKGYYGIDDNTLCIKNGESLSIGKRTLTFHLTPMVHWPETMMTYVNEDKLIFSGDAFGCFGTLDGGITDSQLNTDKYWSEMVRYYSNIVGKYGPAVQTALKKLSDIEIKTICSTHGPIWEKEITKVIGIYDRLSRYEGEPGVVIAYGSMYGHTEQMAEEIARELAANGIKEIVLHNVSHEDPSYILQNIFRYRGLIIGSPTYSNRLFPAVETLTEMIATRDIKNRTFAYFGSFTWAGAAVKHLAAFAESMKWETIPCCIEMKQSITPAIKEQCRNLAQEMAAQLTRMEDKQNTSVKNASEEAFDVTGFFLECISYWKWFVASVVVLAVAVMFYCFRQTPVYEVTSAVYIQDNKGDNSNILLESLGLSSYKKNIDNEIEVLRSKNQITDVVEALNLYTSYSWNSFLRNVPLYEETPIEAVLDSIDVRSLKASLNIRIKPQNGVFHLEVKTRNVRGDEVEICNTTVETFPYSIPFHKGFIRLRYTGDTIPTVDKTLNISLSNPRSVSKSIAGNLTVAFASKDATILKVVYRTPVIKAGEDFIKTLVDFYNIDAAKQKNQGTEKTQQFIDARLDSISKDLSVVEARVEEYRRHNNLIDISSEAKLYLEQTGFTDEKLAELELQKSLVDYVEKFLSIPQNEYMPIPALGIDDKDLAKLIGEYNKSLQQRERLLHSSSESNPVIVELTRDIQTQRSLVLKGVESIRKGVEIKKRDLSRQDKIIEDKIKNVPQYERELSDIMRQQRIKDNLYVFLLEKREENALAKSMTVPVARIIDDPDSTGEPVSPKKILLLCAAVLLGVLLPAFVIYLRMLLFPVLKDKKMLERLTSIPVLAEISKKPGNKFFVVEKKSVEPIAELFRLLRNNLQFVLTGPEKKVIAVTSSVMHEGKTFVSCNMALSFALTGKRVLLIGVDIRRPRLAQHFQMSNMRGVTTYLSGGDSDLSALIQSSGIDSNLDVLPAGPVPPNPNELLMSSRFEQLVDYARSHYDYVILDTAPLGMVSDSFLLTRAIDVVIYVARANYTNKASIEMLNAWIDNKRINVPVYLILNDVNMNSRTYSYRQYGSGKYGYGYASSRSEYVIPWYKRLFRKSDSMRYLYLTFFMILLWGITSCSSSKNVPYMVDIEDIPAEVLNAATVQSSPVLAPGDIIDISVVAKNQEVVIPFNKRLMQGEAYLRGNASKAVEYYLIDQAGNIDFPVIGRIHVAGKSKMEVEHLIQELLYPEYLNELPQVTVWIQNFSISVLGDVNRPGLFTIENERVSILDAIALAGDLAITGRRDNVLLVRVNSDGTKSIARINLNDKNLISSPYFYLQQNDVLYVQPNKSKANSAVVVPPTTSLIFSATSILLTIANLIITAWSISKMLSPFSLFSDSEEGTGFVVQCHESRLNRGFSDKNIVRHVKSVIFAWRLYNWAIIMKKLFVSCSCFLVTALLSVQADNKMDKQTDVVVEECVCQGPSQSPARVILLWGETPPNDELMAMFYDTRLLHFQDPRAPRFLLIDRKGRAALGIGGYVKATASYDFDGALPNRDFVTYDIPVPRNPAERNQYQMDASTTRLFLKLVGANSVLGKYTVYVESDFRGGQDYGFRLRQAYVNARGFLVGQTWSTFVDPAAAPPTIDYEGPNGMTSVRNVMLRYTLDLSKHWQVALAAEAPSVTYTLSDGNNMAIRQRMPDIPFYVQYGWNEGNNHIRVSGLIRGLSYRDLMASRNKSVLGWAVQLSGLANITPKVMLYYQGVYGRGYDRYLNGLNGKGFDLIPDPNNQGKLYAPETLGYVAGIRYSFSQKFFISASYSQSRLYSKTGSLSENSYRYAQYIVGNAFYNLTPDCSIGLEYLYGRRSNMNREDGQANRINAMIQYNFMETITLFLTPEFDTIRDEMGYDENDDFDAYDILFQQGYDGEMIEVEENEIFEIPEGYIATIQATDTNDEFYILDEGEDVFEKEDFQTETLREGQYRYDAAENIFWKINDEPSDLSFMNPLQPEIHPLAPFLPPNARLLLLGSFPPPRKRWSMDFFYPNYTNDMWRIFGLIFFDDKDHFVDIEKKKFRKDNIEQFLREKAIAVSDTVAVANRLNGNASDLTLEVVEPLNLAGMLDQIPLCHTLVTTGQKATDTLLSITGSSAPAIGGFVDFLYHNRHLRLYRMPSTSRAYPKPLTEKAEIYRTIFQNFEQMESLSFIQWCLDNLNYWTITFLMMIESSFIPFPSEIVIIPAAYKAAYGELNMYLVVIFGTLGADLGAIINYYLARWIGRPLVYKFANSRIGHICLLDQKKVETAERYFDKHGSISTLIGRLIPAVRQLISIPAGLARMKFSKFILFTTLGAMCWNIVLAAIGYGFHAVIPEDELVSKVQMYSHEILYILIAICVFIVGFLIYKGMKKSKMIETELCTFTLEACQIAADMGITRVELCASPYEGGTTPSAAFIRMARRIPHLKLSVMIRPRSGDFLYSDKEFHQMLEEISFAHDCGADCVVAGILTSDGRVDEIRTAELVAAAKEMEFTFHRAFDMTCDTNEALEALVRVGCCRVLTSGGRNTAPEGIENIHSLVKASAGRIAVMAGSGVNASNVKLLADTGVDAIHFSARNLTESRMTYKNPSISMGGVQGIPEYASIGIDPTMIRNILNQLIMRKEAPFFLLLAGLICSLSACTSGISTDYKRQLETVLNQSSRADSLRLLLHKTPHDEQEAMAYLIVWMPQGDRDTMNLDLLKENVAYACRVRSEFSWTKALPDSIFLNEVLPYAVVDETRDSWRQDFYNRFAPRVAKCTDIRAAIDTINRIIPEVVGVEYNTLREKTNQSPAESIRQGMASCTGLSILLVDAFRSVGIPARFAGTAAWHDNRGNHSWTEVWIDGTWFSTEYYQPPALDKAWFMADAGKSVSGDHTHGIYAVSFRPTGDWFSMAWNEDARSVHGIDVSQRYRDIYTESTQILTKQGTHTNVTFMMFRDKRHSSDSGDRVEASIDVFCNGVQVGGGRTAGPLQDMNDALSFLLEKGHTYTFAYENSRGEKTTVEVLVGNDPMTVKGYMQMSVIISPSLLSADFGNLNSEIDMINASAADWLHIDVMDGVFVPNISFGFPVLEFVNRRCAKPLDVHLMIVEPQKFIPEVKRVGGAIMTVHYEACTHLHRVVQQIHAAGMQAGVSLNPHTPVSLLEDIIEDVDLVLLMSVNPGFGGQKFIPRILDKVRDLKEMIARRNSHAVIEIDGGVNLDTGRQLVEAGADALVAGSFVFHSDNPIDTIARLKQLMSVYSNWKYFFDSFWKFVSRNSYPIVLVLFFIWICIGIFPLTCYESDSMHVIAGCNIMYNQGLTFPPVYSYLYEMQPLVTYTVVGFKYIFPFLTCEQIYCLLSAICGALFIVESVNFVYRITSFRKIFILLSLFLIPESFAISMYPNSAIFAAVFFVCALNRLLDGKFYVAMVLMVIAPLYRIDILIVYPVVFFIFLFQRKSVKESITRSVFLAVLILLFVTIGYWGLRANPLTALTGYNGMNETHSFASQVKFAVFTFYTILNFVFVPMGLVVLFREKKFGIIGIALIPIILIHFMFRYTGCAPKHYLYLIPFVSLISVYAMRWIYERVKGKPVLKYGIVSIVVLFLCLGIRIDFPDSPWRNVPDSDAKLGPYVQLCRENYTKYHVTIGVGVGQLIPTLDEYMLLSGNLFYPFYIHEYKTVKEGKRIAVKKWFDEKKDYNLLACSWEDIFYFPNLLLEEGYEFRELPCENFTYELLKGDRRVTLYTREIPKGDIQGMVQAIDEVNEYSKGEDLYIVSALENQDYLFNKLSVSGKVRKQMDRLYKVNMKKNLTLFVFIVIGIFSVTAAAPNWGVADTLEHYEIGPGIEYIKIRYESVPLTLWATTIDMTNPYNVIEQVQSNNSVPDLKRELVQDMSKRLTTPGHKVCAAFNHDFFSYDEGVCIGLNISNGVISMPAGSGRSTFAITQDKTASVFFPVPECKAISASGDEVTIDHFNWGAETIRNGDCVLFTNMNSLNLDAEGRYIKIRPRSNWIVNGTPTVCDVLEVSDLPLQTSDTDFVLYLRNTKLNSLPDIKVGEGITISQKLVAGKFGTPPDNILQAFHGYPSIAYEGKLHDGEYNDFENGREYETSCRTMAGMSQDGKTVYFVATELSENSTGINCIDIANWMLAHGAWNVVNFDSGGSTAIVVDHTMLNLPGRGSLRPVMDGVLLVSTAPEDNGVAHYSFSKTQLNVPIISLAPLTLISQNKYKDVIERNVEVEGFAFRCEPAELGWVDKGAVFHAGETVMSGKIIAEKNGITAELPVSTRPVQDIHIAADEILIDSVRPYRINLEGNINGQVYTLDPAAFAWTSSNPSCCRIENGILKGIENGETSLVGTLDTITVGLKVIVEVTPETLVHENFSDLSDFPLFSTVSNTLSISHEELPTGWPNGAVLQFDQKTGRNPYVEMGKSYRLYSLPDSISLQLNLSKEALAAIKHIRFDFTHKNGKSYWQPEYIPSDTGDQTIAWAFSKNGIAFPTEDFPLTLDRIRFVLNPGSRSEITIPLRELKAYYPVKASSAINNVHIENNFAWITAEGELRLHYNLQQTGSADISIWTTAGQQISEYISNRELPGTYTYNIPDRFLSPGIYILTIRANGKNQSLKFRVKMINSRKLQITGLSMLSLVGSGCTDKNGSIENGVRPNIVLFLADDIGAECFGCMGGVSYDTHIIDSLAEKSLFFPNMHAQPLSSPSRVQLMTGLYNDKNYVCFGYMNDDEPTFSQLAQQAGYTTGMFGKWQLGSSREMPTRLGWDEWCLFQLEVYKEFNGPTGTDRYANCMMDNHGHYEYSIYGPDGFESAAFEFLDKQKDSDKPFLLYYSTPLVHTPHTPTPDSESWDLDFAGRFQKDTANFKDMVAYLDKKVGRMIDRLKRNGQWENTIFIFTSDNGTSTRIVSQMADGTLRRGGKGDPRGIGTSVPLIICWGDKLEPRESQRLVDFTDFFLTFADAMRIAVPEEYGLDGVSLFPEIVGEKPLEKEISLMHYNPLWPVAAAPYASRAARTTEWKYYWDGRFYNTKTDFMEEHPIDIDTCSNEIKTIYAKLKAKVEECPNFYPDMPGAPRRGNYGTFYDFAEPNNPFMRPNSDKVYLQQLIAEGEHQQQDFKFEISDARKIARSLSAFSNTDGGRLLIGVKDNGRIAGVRSEEEIYMIEAAAKLYCRPNVEISVQTYEVDGKTVLVAEIPKAEQKPVQVQDETGKYLAYVRIADENILATPVHLAVWRQKNSAQGTLVKYTEREQLLLDYLAEHQEITVSKYSRLAHISYRLAIEYIARFVRFGILDICFEHHRFCYRLSREGMSSMQLLPYKQQVSSLLRLGLPIVVGQLGMIILGLADTIMIGHHSTEELAAAAFVNNVFNLAIIFATGFSYGLTPLIGMLQGGGNTQGIGRVFRNALAANASVAVLLTAVMYTVYCFVDKLGQPEELLPHIRPYFVLQLISLLFIMLFNGFRQFAEGLTDTRTPMWILLGGNALNIFGNYLLIYGSFGFPEWGLFGAGVSTLVSRIVMLLGFIGVVAVARRYKVYREAILRSRFNRNDFIQLNALGWPIALQMGMETAAFSLSAIMVGWLGSIPLAAHQIMISVSTIGFMVYYGMGAALAVRVSHFMGQKDFPNLRRAVNSGMGIILSLAIVASLFFYLVRTPIIYSFTEDHEVMIVVSSLIFSLIVYQFGDALQITFANALRGTTDVKPMMWIAFFSYFIVALPVGYLCGFTWGGGVVGVWVAFPAGLFTAGFLFWLRFRYRLQQLMKKMKKITSICLTIFLGVNIVSAYAARGEQLAILSEDFSAFTEGTESTPAESELSTGNAMIPMEFTHGIQWKGRGIHQAGGVCAVLSYDDYTYGETQGWIQTPYTDVRLDDGNFILRFRARSIAQTKDSLILYLQDQYSNNYYTSEKCTITDQWQTIEVPFQHNFGMGSRLAYVQIGAYNDSWLIDDIEIIQDVYDICSPHAISPKDVTFEHFTARWDAVWSATSYLTSAYYYADEEKTHRVYIAENIETTECECQVTGMEKGKTYFFTVKAKNDKYTSVESNEVQVYVPIRTMPVPELADPTDITDTGYTARWYPVERAMGYAVRHFLKHTARSDEEYTLVHEDLETITEGTFEWPGYFYDYDLNKYSKVPGWGVNMGCTVKGMIGIDNYYRDFEEGKITSPEFDLSRNDGKYTVQLNVYAIHAGDTVYVDSYCEGEKEHREYLMKTVGEHSFSVDFTNGSAQTHFTVTFSGTDKMFIDDIFVKQILRAGESYTSALASFEVEGIDNTSYTFTDLTGSESDEYLYSVASWSYSLDEEGIWGPNVYSEYSEPQIVRLSSSIENVDGIDSDKVYAHNGILYVGVARDALVRIYTIEGKLILSRQITIGKHELDLPIHGFYLVYINDHCYKVSLMNSRICYIVILFCFFACHSDRYQEKAIRLYDYGIEIESFQPDSAAYLYRRALSLTSPNSDLSVALHLRLGNLLRTHHLYNRALEEHTIALKECMANDSTKYTARALREVGKDYLYKNSPDSALGYIKEALSLSEAASDTLEMTAAHNNLSVVYGELKDLEQATKHAYRAISLSKDSTLIYRTYSAIGKMFLLSGQYDSAYHYSRQGSLSPNIYTRANSYKQLCEVALETKNGALYEECVNLLNLANDSIEKINRTESMGETEYQYDLEQILYTEKTRYYRWIAVVIIGALLILFLYIQKRRSRDKAWKAQVEALRQKIETAHECDEGNIKGNMGESNVVARQVDNERKELQSLIDKKGDVCALSFMRTKAYKNMKSMIEAKSESVLSIDERQMVSQSIHKAFNEYIDALKKHTKLTQDEAVLCCLVKCGLNTKECAVCKGVSLNAIRTQKSRIKSKLMMKPTLFVLAAGMGSRYGGLKQLDGLGPNGETIMDYSIFDALRGGFGKVVFVIRKDFEQDFKDKILSKYEGHIPCELVFQSIDDLPEGFTCPEGRTKPWGTNHAVLMGKDVIKEPFAVINADDFYGRESFAILADYLKGLEGKKNEYCMVGYRVGNTLSESGSVARGVCETNAEKHLTSVVERTQIERRDGKVMFKEGDIWTAIDDNAPVSMNMWGFTPDYFKYSEEYFVKFLKENADNIKAEYFIPLLVNDLIQTGKASVTVLDTPSKWFGVTYAADRQSVVDKIHALIAAGEYPEKLFMNDLFDRTDEELVALYAEGNNGAFDVLLKRHQVRTFNYIYYIVKDKELANDIFQETFVKAIMTIKQGRYTENGKFPAWISRIAHNLIIDFFRQEKADNYVITDNENMDIFNRKELSEGTVEDTIVQNQIEADVRKLIKALPHSQREVLVMRYYKNMSFKEIADHTKVSINTALGRMRYAILNLRKMAEENNIVLTLMKKISTSKNTTRVQNAKVLQPTASTIDFIRQFARVYSFDSRLPASLGGLVNNMTLVTQEDSDFTNIFRSSKNGFIQFAYSYLGNMQDAEDVVMESYIQYWENKDKATFQTSNIKGYIFTIIRNRCIDILEERKYLLQKNDELYKHIIGEIELNISSLKGCDPSELFTSEIENIVNDTIKTLPNRTREIFYERYLEQKSYKTIAENFGISVKGVEFHVTKSLNVLRKKLKDYLMEKKTLYRYFGNCATEEERIQVLEWTKASPENLKEFCRERNIYNAILLSTDNIQRTKYDFRRHYRAQLLRIAAVVILLLSVAFGSFYLTMGDRIVPLYSLTVPAGNSNTLLLPDGTKVWLNAGSTIKYPSSFLGMQRNIEIEGEAYLEVTHNRWKPFIVNTPNGKVKVLGTKFYVTSTLKEKDFMVSLIEGSVKISSGEKSAMLKPGYRAQFKDGEFKQSVIRTFETELWKDGIYYFKDKSFDELMEGFEKCFGVKISIDKDIKSTEHYTGKFYRYNGIQHALQALQHDFNFDFKWDKELNTIQITSKHKMYRKSLKAIIAVLALAYAFEASADAYSRISLSEANTPIDEVLKKIEKEAQCLFVINTQVDTKRKVNLNVQNKTVSEILDIMFKGTDVSYSIQNPNIMLSKKAASAQGNVASASATAQSANTKIITGNVTDASGETLIGLTVKVAGTSVATATDIDGNYSIKVPAGSNELEFSYIGYQTIKRPINGQNKINVVMQDNTKLLDEVVVTAMGIARKEETLSYSTQTVGGDELTRAKEANLINSLQGKSAGLVITPNSGGAGGASKILLRGNASMLGNNSPLIVIDGVPMQNSVAGQMDMDGGGATMMVDGSKESSDALSQLNPDDIESITVLKGANSAALYGSAASNGVLMITTKKGKEGQIRIDVSSSTTFETPLKLPKLQNRYGAQMSGSVENGFTMNSNSWGQRMNTLGDEYYDTANSPYHLTRNAYDISDFYRVGTNFNNSIALSGGTKVAQTYFSYGNTTANGIVETNKFERHNISLRQNFSFFKDKLKIDISANYINQKTKNRPTGGTFFNPIYQVYTSPRNIDMNWYRKNYYDTSATWQSNPYSYIASEIGADGLPISVIQSGKTSTLSDANYGKQVWFTDAINLNNPWWLLNRMTSEEVINRTFGSIAANWQIIDGLNLQARIKYDYNERNDENRQYATTWGNAEMIDRGRLILDHTKSQDFYGDFMLSYNKTFKDFTIGVNAGGSMMNSSYDQWMITPIAKSGAPYTEDLSCNQFVLSDIYLNSSENYGGLTTKNWERAIFATAQVTWQDKVTVEGSYRDDWYRAFTQFKDMDPHFAYYSAGASAQMNKILVLPEQINELKLRASYSEVGNSIPNNLFLASAKRNPATGAYISSAIINFKNPKPETTQSFEAGFDISLLDRSISLQATYYNAIMKNQFMKYEGAAGKEIYINGGKVRNQGIELTASYIFAPNNNFSWITNFNYAYNDNKILTVARKQNGQKYTHEIDMGNLSGLKIKFEEGGSYGDLYAVDFMRDEITGEIVVDPQTGAPFKLNGQANEYLGNMNAKHTLGWSNTFNYKDFSFYFLIDGKIGGKVISFTEAYLDYFGTSQRTADARDYAVANNLYWTSEDGVVTKPGMYIPGTNQVVPVDQYYQTIGGGSPVGRNYVYDATNFRLREISLAYTFRNLFGQSKNLTVSANARNLFFLYIDAPIDPDTSLSTQNALGNVDIFSMPTTRSFGISLKASFMKTTVYLSAFVFAAAISLIGCGDPLLDDLNSNIEVGSGDLSIAENYEQAAGMFLTAQQKMHDVGASNGAHVYQVQFNIHIDNYSGYMAGTQNFSGNLPSTYRYFAQYCDGPKASFFNVAQAALPVMRSAADLNLREIGAMCNIMYCFSALELSDVYGPFPWTDYKNDVQEPPVTYEPMDQIYDSLFVNLKDAGKILKEFTSTSEEHQDTINQILAQYDKICGDVKTWEQFSNSIRLRMAMRMSNVNPDRAKTEAQSAIDDGLIEKSIEYNTMVNNGTNHPLAFISILWNDTRINASLENIMKRLKVPFMDKIFEKNSDAIRDENGETTWQAQQDIVGVRTGIQLTPRDDNNQYTKFSGVTSAFANFPLAIFKLSERYFLQAEAALRWNIGGSVNTNYLRGVAAMFDDYDIAQTEPDFQTYWNQESADTSIDYVDPHNSRNNTKGLVTVGVKINNSDDNKVKLEKIITQKWLAQFPMGLEAWNDLRRTGYPRIFPVNDIGDGSLGKGRMIRRIPWNMTDAAAAQDVNTSGIQALGGSNLMRTTLWWDVEDPAGLGDNRRWETEVSNMKTPKLVLSVLACSVVVGNYAQNIPTHAPYVELLPTKEISIAGGDKKTVYLDFYDYFESWEPGVPLSEDENFYIARVPMKKRFVNTATQVDPTMTQDRKFSMWTPMGISDTYWQSLPRYVFDGDNFSMWSYVDSQGGWSLPWVRVPGAYSDVTHRNGVANSGGLIFFDSWGGDNTSPTANVNMLVKKEGGKFKYVEKFVKFLRYYGLDGVGINPEGPVPQASALQDFFSQCREYAESIGWQFHVYWYGVGSNGGSMDLGSSFGSSKQDWLWKNNKQVVDMYMLNYDWGYSASSSASYAEQIGANPYTLYAGYDIQGNWLARGPWSTLKNTKMSIAFWGNHTTNMIYQNSSEFGSGDEAVQACYLEKQEQVFSGGNRNPAKRPAIKDGISSSSEAAMNNFHGIAEYLPARSVLQELPFVTRFGLGNGKTFRNEGKVTFGNKWFNVGVQDYLPTWRWWITDDSNNVPEDGIECGFTYEDAWYAGSALHMSGATKVSNVRLFKTNFDVSETDDVSMTFKLNSGEDTHMKLFWSFVGSESTLHSCDITGAKEGQWTTFSKKASEIGMNGNVALIGLKFENTPTNYDVFIGEMAIVPAKTFAPIKPVITTEESKILKKRTYNSIDFKFSWDCESSKNDSDPSIPVYNEDVDTWYFEVYVQAKDGEPVLCGTTSSWAHYVVGAPVSANNEISDYRIGVCAVAPDGKTKSETTWTSYLTTDLTLVDGIECNKAVIKAGEEFTLSLIDPNQEEPFSWEIFNATTGGNAVFTQDGGRSITTSLSEEGYYDVKLTKGDLSVLSYRGYVQISPESTGAIPSITDFTASDTNVTLEDGTAEVTLSYTGKKNEGTVSRGLQVDDPYMFRIPSDFLPMNQNQYSICLWIKPEKFTFAKFGMGLIEQRNMDIHWPDNNWGALWVDVWPETFNNGGQRILDNNIISYTMWGNESQYYFNGNNNKHEIPNLACCTDGNRTGTESYSLSEGQWAHVLISFDGSKQRIYFNGKKVGEGNASKYNYNDNNGGTGNVKAANIYIGGSRVYYAGFSGVIDDVQVWHKALSDTEVIEAMKGYDGKEIPSDLKGYWTFESDNYNEGEKVFENKGTLVTDNKAAYIEVKGAGGENTSANEEHILPANIAIQGNPAMSGTLPITTTSTFAVADAEVQNTGDNASVTFNKDGKYNVTLTLANGWGSDTKTKEEYIVVLPSSGIDGNLVDNLTVYPNPFIENVNLQFAADGNYVIDIFDAQGRQVTTKKHQAMAGEICTLTVNAAKGMYYVVVSKDGKRVKSFKVVAEMKKNYLFTLAALLLGSTIANAQKPLDGYEEPTFPKDGNVGNIVSFSTSGALEDLENISIPKTPNGKIAQELLVAPGAKVEFTIKINTWWGAFATFSDANETKEMTRLIYCGNSGQGGFEDATNGVTVYVEDNTSKVNTGTLPSITIPESAEEGTTYLLRMMFFGANDTSNPTYNGTYSEGTYYDVKVTVQSQIQKYAINFSTPENGTLTVKNGVNPITSGDEISEGTILTVTATPSTGYELVSVTNNDEVFPSETYTVNASANFAATFKALPTEGDAMLMSAPGYGNGEDCQLRFNDTVLGEHNTTQNQVSSDQRSRNYTFSAWISPMGYNGVLMGHVQNSITWAVEGSYGVGVKDSKLAVWYRKWDGSTTACPGVNAPAVSENTTLYPGEFAFISLVTSNDGRTFKVYKNGKEAISQEVEDGGLALLYDACDFAIGDSKYNQMPCKVEEVQLWNKTLTPEEIEASMFGPKADAEGLVAHYLPESADATTVENLAGDIDAYYRKNGTVTSGNFPMADALQKTNGRSLTLVKYNAPWGEEDLFELHRFNVNIDPHLASSAYVKQYSNLYVVDRSEILDIASVTVDGTPLENVSDPIPVAETGVNILVEQKKATAIESVTAEAIAYYNDKVLYMSQGATAVIYNLLGTAVAEATEMTTNLENLPAGIYLAKVSMGENTTIIRFKKMRNIFTLLALLVFGTILSKNHAQTYSIYPTPQKVIETGEAIKLTQQINVICESGIGEVTRNRMKEVLEEAGYTIAFSTNPSQTNTNLYIGINGSDGAADRYAVENNLPLAVFETGDNKFDPYLLQINDLHPHGDIVILGNDKGSEFYAFATLEQILEQTDGNSIRQITFEDYSHTQYRGIVEGFYGHPYSVENRISLFEFCKRFKMNVFVYGPKSDPYHLGNWRDDYPTSLTEQQRFFGMITQDDLKTMVQAAKACNVDFIWAAHPGLQQGISFSNESAMAPGIDALMKKFDHLYSLGVRGFGVFIDDMTYTPSGDMQAHLANEVQVKIRERYTTDNTDDQVAPLFFVPTAYALNYGASYTLNNLKKVDSEVVIAFTGYDCFSNIRPSAIDDMAGRVGRNPVMWWNNPVNDDHDDRIYMRELTTHWTIEKPGAINTLNGLILNPMNQAQASKIALFGAADYSWNPNAFDVHKNWEEVFHRIADPGDTQTAEAIKCFARFSNTLVEDEEMITLYDNFMEKFGGESFPPESDKLRNELENLKQACTYIETLKDSPHRDYRLMYEDIRCWNAKLKNISTIALDALDMLEYGNSMSRSEGWEKYLRLKKLYTGMSSDSTYLVSALEGYGTSTTEKFYEVKPGDSHLRPFTDFLVEKIGNSIPGLWPAKDSLQIITNIENLQGVELTAQNETVRLTGLNGLDLDKDEYVGIYFGNIEKINVEEITADKTLRVEISENGKQWTPIQLPIREQKTAYIRIKNISEEEVAVDFNQLSVSRILTSVEVKAEASTNMSQYQSYSINNVVDGNSSTFFWSSEAQAAGDYILLTYPSAQPIYEISITFTETDQLSGTAAIEVSADNNQWQTVTEFTNGYLDSTRSFTCNANGLMARYVRFIIRNTVGSYWLQVAEFKADMSEKYTQTTDQSGVQIATLADKDLSTNYQAGEAGYIEHRFIENITIESIEIFHNTIFDSTRKLPSIYVNNGSEWIEKGSLEPLCTVIDTHEIDTVTAVKIEWNKENIPNLYEILPVGTPYVEKPGKPTAINNIKKDGLTIYTNNNRLIVQSDDMIQNIILFDLNGKTINHFNVNKCIFETTFGSNIPQILIVQVMHTNGDLSTCKIIRMKRTTLWIGLGLLLFSSCSNLTETQLQYIDYVNPFVGTGGHGHTFPGPVAPHGMIQPSPDTRIYGWDACSGYHYSDSTINGFSHTHLSGTGCGDYGDVLLMPTVGKQNYRYLGDGCQQTAYASPFSHYKEVAKPGYYSVELDRYNVTAELTATPRAALHRYRFPESKEAGFIVDLDYSLQGQENIDMKLASLSDTEIVGWKKTKGWAENQCIGFYMKFSKPFTCHIVDTVIDIVRDGKSCKLEQKKALLQFPTAQNEEVLVKVGISAVDIKGAQRNVETEIPSWDFDSIMTATQNKWNDYLETIQVEGNNETQKQIFYTALYHTAIHPSLFSDADGRYRGLDQMIHQTKPGKEIYTVYSLWDTFRALHPLLTIIKPDLNEKLVMSLMQKYHEGGILPMWELAGNYTATMIGYHAIPVIVDAYMKGFDKIDGKELLEACIRSSVYDTTGIIASSRMVNGLVPISKYYKNKIGYIPYEKENESVAKGLEYAYNDWCIARLAEEIGDTATYEKYKALSKSYINYYDPQTRFMRGKDLKGNWHVPFNPRYSDHRNDDYCEGTAWQWAWFVPHDIEGLIALMGGQEKFIGRLDSLFIAESKIEGPLVSSDISGLIGQYAHGNEPSHHIVHLYNYVNQSWKTQQLIDTILHTQYFNNPNGLSGNEDCGQMSAWYVLNAMGFYQVCPGSPIYSVGRPIFDKVTINLPNGKVFEIIANNNSLTNKYIQSIRLDNILLESPFFMHSDIMKGGKIVMEMGNTPVKQMKNMNRYLALVALIISLISCQSEDNPNRYELIPYPNDMEQMSGRFSFDDDTQIFISPECGDEVNEILARFAEQFGKTAGKDLKIAEKGGKNMMIVKIDTTMSQEAYRLNISKKKIEITAATPNGVRYALQTVKQLLPVAIYGESLSADENWSVPCATINDAPRFGYRGMHLDVARHFFTLDEVKRILNVMAVHKLNTLHWHLTDDQGWRVEIKKYPRLTEVGSIRNKTMIRKEWDNYDTTPYGGFYTQDELRDMVKYAADLGITIIPEIDLPGHMMAALASYPELGCTGGPYEVSGQWGIRDDVLCVGKEKTFEFIENVLLEIIDIFPSKYIHIGGDECPKIRWEKCPACQARIQKLGLKDDEHGKAEHYLQSYTTERIEKFLNEHGREIIGWDEMLEGGLTTNATVMSWRGVAGGVEAAKQGHYAIMTPTAPLYLDYYQSRDTQNEPLAIGGYNPVDMVYNFNPIPESLTEEQAKFILGTQANIWTEYITTPEHLEYMILPRLAALSEVQWDQVENKSYDRFLDNIGHILAIYDVMGLNYAKHILEVKGEYSVNETKGCIEATLRTQGNAPIYYTLDGSEPTTNSTRYTEPIEIRTENDSCTLKAIVVREGIETRTLVRPFKFNKATGHMPQLKDAPSEKYTFGGAGVLTDGIHGDFNYSNGCWLGFIDTPLDATIDLGKTQTISQVKIGSLVQYSEYIFPPTQIKVYATNGDNPMTEIGKLEIPVTQKQDQDGVRKYTCEFPAVPASKIRVVIDTTDKIPAWHGAKGEKGWLFVDEISVNMNTHNIFKSVLFSTLLLIGNSCSERKEIDVIPMPRSVEYHSGNFTISPETKFYTNLSAESRQALTDYLEGTSLSSVPFAESATGNNGIELNLCDSSIVTGNEAYRIEIVKKGVRLSANTETGIFYGLQTLLQLLNNGDNKTLPALTINDSPRFPYRGLHLDVSRHFFDKEFVKKQLNAMAYFKMNRLHWHLTDGAGWRIEIKKYPRLTSFAAWRPFDKLNDWWVEGRTFCEQDDPRAVGGYYTQDDIREVVAYAAERHITIIPEIEMPGHSEEVLATYPELSCSGKPYVNADFCIGTEKTFEFLENVLLEVIDLFPSEYIHIGGDEASKSSWKTCPRCQKRMADEHLNSVDELQSYMIHRIEKFLNDHGRKIIGWDEIIEGGLSPTATVMSWRGEEGGIKAVKAGNQAIMTPGKYCYLDAFQDAPNTQPMAIGGYLTLEKVYSFEPVPDSLSTKEAELILGVQGNVWTEHIPTPEHYEYMIYPRILALAEIGWSPSEVKKWDNFHTRALQAVNILREQGYNPFPLEKEIGDKPESYQKVNHLAIGKKVTYANPYSNHYAAQGEKTLVDGVRGGWMYNDDRWQGFIDCDFDVTIDLGKETDIKQVRAEFIQLKGPYVWLPKQVIISSSVDGEHYDTLATVDNDISPDIETLQFKEFGWEGNAKARYIRYKALSNGIAGGWLFTDEIRIKMKKVSKEKSINPIAWVPSAYFAMGLPFIAVNLVSTFMFKDLGISDTQIAFWTSVIMLPWTLKFLWSPFLEMYRTKKFFVIVTQLLSGLLFGIVALSLNFDYFFAISISTMAVIALSGATHDIACDGVYMAELSPEDQAKYIGVQGAFYNIAKLVANGGLVAAAGMLAEHFGASEGASIQANMPAYKEAWMIIFIIISALLLLLGLYHSKVLPSTQVPNQEKRSSSDVAKELWEVIKNFFTKKHIFYYICFIILYRFAEGFIMKIAPLFLRSSRDIGGLGLSLTEIGTLNGVFGSAAFVLGSLLAGVYVSRRGLKKTLFTLCCVFNFPFVAYTLLAIFQPENLYLIGTGIVIEYFGYGFGFVGLTLFMMQQIAPGKHQMSHYAFASGIMNLGVMLPGMMSGFFSDWLGYERFFIYVLLATIPSLLITYFIPFTYDDSKKESNRMTKKMVMPWEDRPAGCADVMWRYSKNPVIDRYHIPSSNSIFNSAVVPFEDGFAGVFRCDNKAVQMNIFAGFSKDGIHWDIEHDPIKFKAGNTDMIESEYKYDPRVTWIEDRYWITWCNGYYGPTIGVGYTFDFKEFFQCENALLPFNRNGVLFPQKINGKYALLSRPSDSGHTPFGDIYISYSPDMKFWGEHRHVLSPTPFPVSAWQCTKVGAGPIPILTDEGWLMFYHGVITTCNGFRYSMGAAILDREDPSKVLYRTQPYLLAPAMPYEMQGDVPNVIFPCAALHNEDRVAVYYGAADTVVGMAFGYISEIIEFTKKNSTIMNIRNLIVAGIIMTVSSATLSADEPVAYVNPFIGTTNFGTTNPGAICPNGLMSVTPFNVMGSDKNVYDKDARWWSTPYEYHNTFFTGFSHVNLSGVGCPELGSLLLMPTSGELNVDYKQYGSEYALEEAHPGYYANRLTRYGIDTEVSATPRTSIARFTYPGGESHILLNLGEGLTNESGATIRKVSDTEYEGSKLLGGFCYYNRQGVFPIYFVIRVNKKPLQSGYWKKQRPMTGVEAEWDPDNGKYKIYTRYTKEMSGDDIGVFFSYDTKPGEQIQVQMGVSFVSIENARQNLDSEQQGFQFDKVCLDARNQWNDILSRIEVEGGSDEQKTIFYTALYHMFIHPNILQDVNGQYPAMESDKILTTRHDRYTVFSLWDTFRNVHPFFTLAYPQKQLDMVQTLIDMYKEWGWLPRWELYGNETLTMSGDPAIIMLADTWLRGLKNFDAETAYEAMVKSATAPSSENILRTDNDDYMKLGYVPLREQFDNSVSHALEYYLADFALSRFAENLGHKEDAQTFAKRSLGYKHYYCKEFGTLRPILPDGSFYTPFDPLQGLNFEPAPGFHEGNAWNYTFYVPHDIDGLKRLMGGEKKFAAKLRNVFDENFYDPANEPDITYPYLFAQVKGEEWRTDSLVNSLLKKYFKNQPDGIPGNDDTGTMSAWAVFSMMGLYPDCPGIPRYTLVAPIFDKIILHLDPRYYTQDTLVIECERPSPKAIYTDRITVNGKKHKGRFISHEDLVNAGTIRFTLTEKKMQEKIIILDFGSQYTQLIARRLRELNTYCEILPYNKFPYGEEGIKGVILSGSPYSVNDPNALFVDLSRIRGVYPVLGVCYGAQFLAHTSGGKVESADTREYGRANLAWHDENDPLMRGVRENSTVWMSHGDSITVIPSTFTLVASTHEVKTAAFHIEGELTWGVQFHPEVYHSEDGTLLLTNFVRDICHCDMDWTPASFIEHTVAELSTKLGDDKVVLALSGGVDSTVAAVLLNKAIGNHLTCIFVDNGLLRKNEFESVLANYKDMGLNVLGIDAKDYFYEQLKGVTEPEKKRKIIGKGFIDIFDREARKLTDIKWLAQGTIYPDVIESLSITGMTIKSHHNVGGLPEKMNLKLVEPLRLLFKDEVRRVGRELGISEKLIGRHPFPGPGLAVRILGDITPEKVHILQEADHIFIQGLIDNDLYNKVWQAGVVLLPVQSVGVMGDERTYERAVALRAVLSTDGMTADWAHLPYEFLAKVSNDIINKVRGVNRVVYDISSKPPSTIEWEMELDALITDLALILIVAGVVTLLFKKLKQPVVLGYIVAGFLVGPNFVFFPTIVDEGDINLWAELGIIVLLFSLGLEFSFKKLFQVGASAVLTALVIVLGMMLAGYGAGRLLHFTYLDSIFLGAMLSMSSTTIIIKAFTDLNLRKKAFTNLVFGVLIVEDLFAVVMMVILSSIAVKNSFEGAELLESIAKLVFFLIIWFVVGISILPLILKKTRKFLNDETLLVVSMGLCLGMVVLATYAGFSSALGAFVMGSILAGTNEAERIEKVVQPVKDLFGAIFFVSVGMLVSPASLSQYALPICLLSIVVIVGQIFFGTVGMLASGQTLKISIQSGFSLSQIGEFAFIIASLGMSLNVIDKFLYPIVVAVSVITTFLTPYCIRLADPAYSWIERRLPERWLAAIDRYSQSRTEIKPHKAVWKEAIAQYLWRVLLYSSLIVAIIMVSKMWFIPLMVEILPEWGRMIAAIVTLVVMSPFLWALMVKEVSMSLIRKLGEGSVNRVPLTLMIVFRILLALFFVIYYLSIVHSQRTGVLLGLGIFIVVLILLSKRIQKQFMRIENIFMDNLNERELRKTGRNTSLVSDMHLAYMDVNADCPFAGRRLMDSDLRKEYGINVVSIQRGTRRINIPKGETRIFPGDTIGVIGTDDQIQSLLTVVEGSESPEEETDNREVTFTHVVVPGNSPLIGQTSSSLSIRNKNNCLVVGIERADGTFHQPDGQTCFEAHDVIWLVGEPDNIKQLIQDKIENHIQHTMNLFNDFLNTISDTEVTTTSAIFKLMLSLLLGGIVGFERKRKGQVAGARTFALISMGATLAMIISIYIPQVYLGLKNGDPGRVAAQVITGVGFLGAGAIIQTKGSIRGLTTAAGIWMVAALGLAVGVGLYVIAIISTILILFTLVSLEQYERRTNLDREGKIIHLKATEIVEDLTRYEKLLGEYKVSLHNVLVEYNYSEQKTDLKFIVLSRSTTDFVSLFSHMRNIYRTEYISLQNEIMKAFVFPGQGAQFVGMGKDLYENNPVAKEMFDKANEILGFNITDLMFNGTDEDLRQTKVTQPAIFLHSVILAKTMGDDFNPDMVAGHSLGEFSALVAAGALSFEDGLRLVSARAQAMQKACEKTPSTMAAVLALPDARVEELCASVTEGVVVPANYNCPGQIVISGSIEGVDAACAKMLEAGAKRALKLKVGGAFHSPLMEPARAELADAIAHTDFHAPKCPVYQNVNAEPQTDPETIKKNLIAQLTAPVRWTQTIQNMIAAGADTFVEVGPGAVLQGLVKKISSEVATSGIQMNTFSAILLLFGNLGTTELIVILVVVLLLFGGRKIPELMHGIGKGVRSFKKGMNEIEEEINAPVSKNEEQKKEEGKMDNELKEMSFWDHVDDLRRVILRSVGAIILLSVVFFTLMPRIFDSIILAPCHSDFILYRLLCDLSQHTSILPDFCNDHFEVKLINIQLASQFFIHMSTSMWIALLFAFPYVIYQLWTFVSPGLYAGEKRHARGAFLAGNIMFFIGIGVGYFLVFPLTLRFLAEYQVSEMVPNQISLDSYMSNFLTLNFIMGLVFELPLLCWLLSNMGLITRRFFKTYRRHAIVILLILAAFITPSSDPFTLSVVFVPLYALYELSAWVVKPASQKDDGNSEEDSNEILDEHMKRILSILFTVVCGLACLQAQTVGLVLSGGGAKGIAHIGIIKALEENNVPIDYVAGTSMGAIVGAWYAMGYTPDEMLDLILSEDFNLWSRGIFDKRYVYYFKKPDPTPEIVTFNVALQDSTKFEPHFLPNSLINPFPMNYAFMSIFAPYSAQCEGNFDNLFVPFRAVASDVYHKREVILRNGDLGDAVRASMSFPFVFKPIEIDSVLVYDGGIYNNFPVDVMKSDFNPDIIIGSIVAAKLDKPKEDDLMNQIENMVMQKSDYTLDPEDGILMRFNLSDVGLLDFPKARQIAKIGYDRTIAMMDSIKSRIPRELSQDTRQLQRMVFKSKTPDLVFDKVSVEGGNHQQREYIRRQFDSDEPFSDEQAKAAYYKTISDGKISDLIPHARYDKESGMFNLDIKAKVHDQLAIGMGGFISSTSSNQIYIGAHYRTVSLNSLDLDLGGQIGQSYTSGMLSARFDLKTVIPMYLKLQAVASKQKFYQNETLFYSDRMPSFITQSEQYVKLRLGLPFLTGSKAVVSVGYGSMNDKYYQSNTVDFSKNEQDRSRYNLLVASMKFDQNNLNNYMYPTSGTDCSVLGLLAYGKERFKPYNSNLQPHSKQTLSWLQIEGNIHTYFPLGNKFVLGVRGKAVVSSKGLLSNYTSTLIQAPAFTPTPHSKTIFNPAFRSTQYLAAGVIPIWKILNNLQFRNEFYVFAPFRQIYEGENMVPYYGKAFTKYHFMGESSLVLDLSFASISLYANYYDYPARNWNFGINIGLLVFSPKFLEMKPKTEIILINISGDDKPGVTTALAEVLARYDAFILDIGQADIHHTLSLGILFKTDETKSGDILKDLLFKAYELDVNIRFSPISEEEYTRWVGLQGKNRYIITILGRCITARQIGEVTRIVAEQGLNIDAIQRLTGRIPLDETVRPPKSCIELSVRGTPRDKVAMQSEFMQLSAHLGMDISLQEDSIYRRCRRLICFDMDSTLIETEVIDELAVRAGVGDEVKAITESAMRGEIDFCESFARRVGLLKGLDESVLKEVAESLPVTEGVDRLMQVLKRAGFKIAILSGGFTYFGNYLKQRYGIDYVYANELEIIDGKLTGRYVGDIVDGRRKAELLKLIAQVENVDIAQTIAVGDGANDLPMLSTAGLGIAYHAKPKVKENASQSISTIGLDGVLYFIGFKDSFISEANMKKVIWSFSLLVMALFLSCREDDADRFFSGQNDKLIINFSVQDPTSGLATRSAIAPEAGEENVKTLDLFFFESNSTGTGTFKGLKELIATPENPLVMNTDMVFDFSDIGLSMTEPYDILIVANMGDNYLPTDGSQTLADWKSVIQRKNYKEAKAEIQVFMSGTDTNVPEYTTKPLESDALLMSASLKKGKQDTKLKAVLQRAVSRFDIYNLAAGYTIETVSVWNAYPSLFVWNGEPNAFDKDAERIARLYGFENKTGGNELVGKLYAFENYVASPKQNDEFTTCLIIGVRNSSSGTVSYHRANIHPLGSGQSLKRNNVYKLTINSVKKEGYTTELEAYKGEIASLGYSINYWDMDSHGTVQFDGDNILAIPTKKVMFTPNGGSYSLGIFTFGEGTLSLSKKVLDDGISVGLSGKTLTVSATILSNVKDQRSGIIELSFGNLKATIDIVQLEGGDLYLKLNPKSIPYFANTAGVAAPPIAVEGSGDWEATIYPPGAGAFFSFAQTGTSAVTDYDSGKATNNIIPIYTHTANATTSPRYGFLVVSLKEDPSVQSTMLLIQSGEPGFELTPSVTAIDFEYDGELTITGNNTNTFLVNPGLSTDGTTVNQWKYVLEGDNAEAFEIKDIHDDKDLKLNRLTVTAKQENASSNTLNARLYLALVDDPNVKSHVITISQKPMSFNTGIVGNTLYVSENADETQVVSLQGSSRMKWIAELEQPEPALVHTYAVKLVGEKGDAMSWGSEYSMGTKFKIQLPKILYKDANRDITYHVKLTLAGTDVSSRIAIVRKVLKPISISVANLYGGYGALGNGILSTFRDYGIYSTFFGSQGIVYMPVTPTLPNNESNSAGVGANIPDNVNVLFSGRYATTVSNYYDNLITWLENSPNKNRFAIVSLDNSNSENQALFAKFTSWGYKYRGNTGSYASWVTSHTNDPVWDYIVKNGPFSNFRPSQQINFNAMFYRDGISGTFDVPTGVTSVLEVAGNGCSLSIDLQRRIIFLGDSQHTNTWTPACNALATVTDNEYYGRGVLWATLWAIIYNTAQYGDHFTDVFNTRMKNLFILSIIFTLVGFYSCQTRFNDEPSSEDYSSGESEVEISIVTDPVSRSTEYSTPNENIVENLDVLLFDSEGKFLCWRTTFKINGKLRTTLPIGKDYDAYFFANCRSFIEKMLPDEVTESQYIGKADWEVFRKELVDEDPKRLLQNTPVFTCLPMWGMLEKQEVKDGVINYWPLLSLIRSVASVDVYVTTDIAEFTLKDATLYNVPDKGFLGNSSNNIVDDKVQVAYSPVDMGTALILESSDYNISDQSIANKLYLYDNDTQTETENRRHTRLVVGAEYKGSKYYYPIDFEDSEADKLIEIVRNKKYVFNINSVSGPGYTDKETAAGQPSVHLNVNIVEWDMTAGQMGTSGNYYLWTEKREAVLYRDTNSMTSIGVESNILSQAILLAFKTDINGSVTTLPNGIQNNRFKVELIDDTDGYPISLRVTALRDFDKTTSTANTDTIVLLSGRIRLEIQIFRYDKGMNDWELDDDIDIDLEKMKKIILVLLVIFCMGCTREGPHYGCEDGALSLVFTHEGSTANFDRSVADDIELYLYDNNGKNVEMRHIPYEEIKGGKPYFLEQRYTGSIYLIAWILSGDRVDGKAPIVFFNEDNYFTARFAMGERPISRSQSYSGSSQELFLGSLMFDSNPLEEKVINVEVEKMLCSIAVTIKDGNSFKKQYPGKLSMTVAGASDSYHVSKGHQSGDRVIIEDNFTYVESEDEYVSNNKVLPASMEAESGLEDNIVITILENGIARLAVDTETKAKKGTRIDVVIRPTQQEAIISVDSWQIRKALIVLMRIKNLWAVAITVCTLLSCSDSDNSMNEPIVQGKKAAITVKIKGSTVTRAQTGEEAGSADENAIKSLEFFVFNSDGSYQKYFKPEVLATNNQYTFLVDAGNLTVLTAVNQNLGEPSPAPASLTDFKKNSLYKELLLDGSNSRADISTSTGFAMAAEGTINVVEGETNTLNLSVRRLLSKIESPKVDPSNQITAPKDDLLKILGLGENGTVPSDLKWTFDGYMVINGINQSRAFEYKELEDWTRFATATNFKTTFSMDGETVESVYSVKKDDADETTNGFLPAIYDKPVYVYENVPTTLQGGNGSVATVFDKDEVVAFIVRGTFSGTGVSGVTRYWRVNLLKDDAWKIYRNSIYRITMKDIKTVGWSTPKEAEEEGPVVSPTESSISINIEVAQWDVRTQDVDLMMKYIIHTLTILFFFSLLVLVCFDSMASETTHRGKLSITEIRIQVVGDSIELSFNCVPERFVLKGKERIVVIPMISDGINQSQFLPFVIVGKKGKMSFLWSSDYRNGMKIVKHKQEFVYREKMKYEKWMKGGLLSFQGLVKSCTKQAKLITVPVCGRILQNPDPEESESIIKKNQPLGFIKKLGLRTIFMEADERLKKDFYNHYKTTSMQYTITEKLKRLMYKILVAFLGVMFTCFSGVAQEELSVLADIGYKEKITSALSSKLVEYKNTSVSKDTFLLKQSGERAIDMIAGNDDMLVDSVIINIDVESSWKNRTHKSLRWSLKTNLLYAATSTPNLGLEVDWGTQMSVNVIGGYNPWNRKGKKGDNDKIVHWLIQPELRYWFCEPAGGHFIGIHAIATQYNIGGHKFFHIFDKGYRYEGWGAGAGFTYGYSWMLSRRWAIEAYLGLGIVHLDFDKSNNKNWCCTRSEHFTKTYLGPTKVGLSLIYNINKMLALVLLFSSAFNPVETGLKEGKQAPMLKLKNSEGAVTLRELKGRYVLLNFWAGYDAPSRMENIRFAREIDKSEIENISLVSVSFDTSRKVFEETIKRDGLNTATQFYDKDGSQSDIFDNYRLNKGFASYLISPEGVIIAKDPNPEQLTKLIRQMLRPLGYRDSFPEIVCKDNVNRLLSQCYVMKNIKVQSLLLRMIIASQKKKENIAEYLLYMWQIEDIIRAYGLDIDQIQKHIIDSYDLPEEQKKSMRDWYESLIDMMHSEGVEKKGHLQLNKNVLIDLTDLHLRLLKSTREPFYGAAFFKTLPYIVELRAKSGEGKTGELETCFNALYGVLLLRLQKKEIQSDTLKAIQQISTFLSILAEKYKQEKAGELELEMTKKILITGANGQLGHEMRNALKGNNRFECIFTDVAELDICNAEAVKQIIADNHIDYIVNCAAYTQVDKAEDNAELCKKINTDAVENLARAAADYGARMIHISTDYVFNGRGYRPYTEDMVPDPQSVYGSTKLEGEKILTDICPESIIIRTAWLYSPYGNNFVKTMLHLGEEREELSVVADQIGTPTCAADLAQAILVILQADTFVPGTYHFSDEGVCSWYDFTVTIHRLAGITTCRVTPIRSDEYPSKAHRPFYSVLDKSKIKKTYGLTIPHWYESLSNCIKLLQETHMSTLTEEISKRRTFAIISHPDAGKTTLTEKLLLFGGAIHIAGAVKSNKIKKTATSDWMEIEKQRGISVATSVMGFNYGDYKINILDTPGHQDFAEDTYRTLTAVDSVIIVVDVAKGVETQTRKLMEVCRMRNTPVIVFVNKLDREGRDPFDILDELEAELKINVRPLSWPINIGQKFKGVYNIYEQNLNLFTPNKQVVTERIELTDVNSPELETYIGEQDAEKLRADLELVEGVYPEFNTEDYLAAKMAPVFFGSALNMFGVKELLDCFVKIAPAPKPIQAVERVVRPEEENFTGFVFKIHANMDPNHRSCIAFVKVCSGKFERNANYKHVRSNKMMRFSSPTAFMAQKKSVVDEAYPGDIVGLPDTGNFKIGDTLTCGEELHFKGLPSFSPEMFKYIENDDPMKSKQLNKGIDQLMDEGVAQLFVSQFNGRKIIGTVGQLQFEVIQYRLLHEYGAQCRWEPISLYKACWIESDDPQALEAFKKRKHQFMSVDRDGRDVFMADSNYVLQMAQTDFPKIKFHFTSEFMNAIFHIIDKSNWERIAHFNYYYSQIKCKYNLTSNIDITHLVRWQKVNRYKFFPTMLFVIMKAVNQNKEFRMSFNEKGELGYWDKVVPCYTLFHNENKTFTDIWSEYDEDFNIFYRTVIEDIHTYGNITGVVKARPGQPANFCPVSCLPWLSFTNFAQDTYSESRFLFPLIKFGKYFESNGNIQLPISVFVSHAVADGYHTCKLINDIQEIAQKFFAMLTIELDYKNSKEKLIKSFNKKIPGKKFFPGIYTWRVFQNLIPLYCQEGSISIRNDMGNEDLLKQVTAKAQIWLGDGYDEETKAAVRAMLDNEDKTDLIEAFYKDLEFGTGGLRGIMGTGTNRMNIYTVGAATQGLSNYLKKAFADLPQIKVAIGHDCRNNSRKFAEVAADVFSANGIKVYLFDALRPTPEVSFAIRELGCQSGVILTASHNPKEYNGYKAYWNDGAQMIAPHDKNTIDEVNKITSVKDVKFRGNAELIEIIGEEIDRRYLDRIKTLSLSPEAIAHHHDMKIVYTPIHGTGVKLIPASLKNFGFTNIIHVPEQDVVSGDFPTVVSPNPEEPAALDMAIKKAIETDAELVMASDPDADRIGIAVRNDKGEFVLVNGNQIVMIFLNYLMTRNKELGLLKGNEYIVKTIVTTETIKTIAEQNGFKMYDCYTGFKWIASVIRENEGKARYIGGGEESYGFLPEDFVRDKDSVSSISLMAEIAAWAKDKGMTMYQMLQDIYIKYGYSKEKGISVVRKGKSGAEEIVAMMKNFRENPMKELGGSPVILIKDYASLEATDMVNGTKSKLDMPVTSNVLQYFSADGSKVSIRPSGTEPKIKFYIEVRGIKMDNYADYDAANAAADAKIEAIKKELGIMKKIAILVFFTVGFFVHVWACTGLIAGKQATVDGSVLVTYSADSHTLYGALTSSPAADWPKGSMRSIVEWDTNKPLGEIEQVEHTYAVIGNMNEHQLTVVESTWGGRPELVDTTGIIDYGSLMQLALERAKTAREAIKVMTGLVKKYGYYSSGESFTIADPNEAWILDLIGKGPGRRGAVWVAVRIPDDCIAGHANYPRIHKIPMDDKENCLYSPDVISFAREMGYFDGLNKDFSFARAYSPADFGALRACDARVWSFFRKYDSSMDNYLPYVNGESAEPFPLYVKPSRKLSVQDMKEAMRDHFEDTPFDMTQDVGAGPFKVPYRFRPMSFEVDGKSYCMERAIATQQTGFTLVGQMRNWLPDPVGGVLWFGVDDANTCVYIPMYCGITQVPECFSPENGSMYDFSWTSAFWIHNWVANMAYARYEPMIGDIRKVQSAVETSLNLRQPAVDKAAVELYATSPQEAIAYLTQYSCDAAEASTARWKKLGEYLMVKFLDGNVKQEENGKFKDNGYGLPDSPLFPGYSQEYYEEIVRQTGDRFLETPPKYMRNIMYLRPIFLGIFSFLILTVSRGEMISPLKIPLLMSANFGELRPNHFHSGIDLKTQGRIGLPVYAMDDGYVSRVVVSPWGFGRAVYINHSSGLTTVYGHLDRFAPFIDEIVRRQQYEQEDFSIDCEFAEGEILVAQGDIIGYSGNSGSSGGPHLHLDIRDTDTQDPMDPQEWLSSLITDDVAPEVRKLVFYTHEGVMGNTARRTERKAVRASAGSYSIGESVPVWGDVSFGIEAYDRMTGTTNKYGVHQVDLYIDDSLFFSTYIYRYSFDETRYINSFAEEGEIMRTYIAPGNRLKSIYKQVENRGILHVDEERAYRCRYVLTDYDGNSSSVEFSLIGKLQEPPLPKKEGIYFSYAVDNLYKKDDFGIFVPAGALYENLDFTRRKIPSKKYYSDIHIIAPSVPPLHKAAEISVRLTEDKLSDKRQYYLVRLDDDRSYPVCGEYANGWYKAKITEFGSYAVLVDTLPPTILPIVPDKWSTQGKVVLKISDDQSGLKSYRGEIDGQFVLFELDGKTGRISYRLESNRVKKGSEHTLHIVVSDMCGNEQSYTNSFVWMKKISLLSIFIFLVLNSIFAVTYDNLYVVGNACSAGWNPDGALVMVQESENTFTWSGPLKKDNGNQERFKLLTARSWTTSLTCNLEKAGHQIITSGGEYDLYIKLETDGKPDNAFQVAETGIYTIEVNTSSMKMKCTKIADYEDPNLVFTKETFHSTSEGSLNYRKLEPPTIEKGKQYPLVIFLHGAGERGSDNESQLRYGSEMFANPQNRKDYPAFVLFPQCPLSNFWPFESQPASYDATTFPIDYPTSTPIKLVKELIDSYLQMEEIDKDRIYILGISMGGMGTFDIACRYPETFAAAIPICGGVNVERLDNKVKNIYWRLFHGDADGVVPVNNSRQAYQKLTNIKADAEYIEVPGASHFVWDEVFKREDFLSWIFAKKRQSTGGSDIETSKTDTSLRCYCYKQMLYIDTNDQTPLKANVYTTSGSLVHSSCYNSSSIVSPLTSLKPGIYIIEILQGEKRYHSKISLMRNRIIYPALCLMLSVVSSNAQKLYTLEECRTLALENSAKMKNSRFEVEVAKQTSKEAFTNYFPNVSAVGAIFKASEGMAQMDMALPVPGIPPLSMEMLKKGKTAGVTLVQPVFMGGRIVNGNKLANIGKQVSEYQLSLTKDQVEASVNQYYWQIVALKEKLRTLETLETQLKGIYKDVKAAVDAGLTTRNDLLRVELQQQDIMANRLKVENGLSVTKMLLCQLIGVDKSEFDIAFDDFPSAVSPLDYYVAPETGLENRAESKLLDKSVEAAKLQLRMKRGENLPSVGVGVGYIYHDLMEKDTDFGMIFASVSVPISSWWGGSHAIKREKIKKQQAENTRQDSREMMLVEIEVKWNDLQEAYQQVLLSEKSIESSTENLRLNNDYYKAGTVSLSDLLDAQSLMQQSHDQYAEACTAYQQKLTAYLQATGRMKTKGGIIEAAMKYRQIVILIVSLMFFLGIYALIKMPKQEFPVFTVRQGVVIAVYPGATSDEVEEQVTKPLEDFIFEFKEVKKSKTHSLSRDGMAIVFVELNDDITDKDEFWAKFKHRAAVFKSELPTGVLALVTNDDFGDTSAMLITIESKDKTYRELENYLDELKDRLRSIDAVSNLRTFGVQKEQISVYLDPAKLARYAIGNTTLATKLLAQGFTTMSGAVDNSKFVAPIHISEAYDCVNDVADQIIFSDPQGHVIRLKDVARVVREYSEPDSYITNNGTKCLVLSMEMREGNNIVQMGEDVNKVLEEYEKELPDDVSIFRITDQSQVVGDSVTTFLRELLIAIIAVIIVVMLLMPLRVASVAASTIPITIFLSLLVFYACGLELNTVTLAALIATLGMIVDNSIVIIDCYMEKLDSGIDRWTAAIESAKEFFKSILSATLAISITFFPFLITSQGMINDFLQSFPWAITIILFLSLLVAVLLVPYIQYHFIHTGFRKQPKEEKKQRRSFLTILQSSYDKLIVKCFAHPIRTMGVGLLSIVAGVVIFLSLPMKLMPFAERNQFAVEIYMPFGTALEQTAAVADSLESILRQDSRVVSVASFKGGGSPRFHTSYAPQMPGSNYAQFIVNTIGNKATEEMIAEYKDKYLNYFPNVRVRFKQLEYSEAAYPIEMRVKGNNRDSLRLAADKVKSVMSEFDGLSLVHDNWEGQLPGVSLRLKDDEMSRLGINKALLSTGLSMHLGNGLPVTTVWDGDYPIDVVLKDGGNIEPSYEDVGNQYVSAWGGTVSVPVRQIADIEPDWHDAQIAHRNGIPSISIQSDVKEGSNAAALTKEIVKAIEKIDLPDGVDFEVGGSEETDNEMLDMILRGLFISIVVIFFILLFHFRRINMALLVLGSISLCLLGAALGIWVMGLDVSVTAVLGIVSLMGILVRNGIIMLDYADELREKEGLTVREAALHSAKRRMRPIFLTSAAASMGVIPMILGGSPLWSPMGSVVFFGTIVSMVLTVTILPVAYWLIFSRADRKSINHMEKSMKRNGKAFAYLFLAVWSMTSIGCTSSSKEERAVREIPVKTWTVSLREGVYTRSYIGEIEGESSSSLSFQVPGYVECIYVKEGQRVERGELLARLDETTLQSTYDAALSTLKQAEDAYARMEQLHKSGSLPEIKWVEVQSSLQQARSMEQIAKKNLKDVELRAPYSGIIAQKSIDTGSTVLPGVPAFKLMKIDWVNVNISVPENEVADVKMGADVTVTVAALGGKSFSGKITEKGIAADPLAHTYKALARIENRQGELLPGMVCVVNMGSRNNSQIVIPNSVVQVDYNGDHFVWLCNDGVAVKQTVSVGALSGNGVIISSGLAVGDKVIVEGASKVSENMKVSEQMDKKGIESFTLAQLSKLIKRNNPTGLDDDFIIIGENLPNTELFKYPCRVDALVAVICLEGELICNINLKEYRITTNMMIINTPENIIQVKDIGNRKFYGIAVSSAFFEQSFLDARDMIPLYMQIQKEPCFHLSNEDTDIFCQFISLMQLICHTQDTPKKTATLLRLGSALMYKIHDTILAHDSPSKNEIKMSRQEIFFGKFIALLTQYHTQERSVTFYAEKLCITPKYFSTLIKKQTGKSAAQWIDDYVILEAKNLLKFSGMSIQEIAYHLNFSTQSFFGKYFKHQTGLSPSEYRSSEMSVSWNLWHGCHKISEGCRHCYVYRQDSRYDKDSSVVTRTAAFDLPLRRKRNGDFRVPSGEMVYTCFTSDFFLEEADEWRAEAWAIIRERCDLSFLIPTKRIDRFRVSLPSDWGDGYDHVAIACTVENQDRVNYRLPLFRSLPIRHKLLFCAPLLGALDLSGYLDDDIEEVSVGGESGMDSRVCDYDWVLDIRRQCIAADIPFSFHQTGARLRKGGKVYRIRREFQHSQARRAGINYKIDRMSVIMTYLLRFLCLCNYKIGYGSAWSNWKQEFYLPLRSPFAIFAMGFIDFLGDNLVQFWEYTGFANCTLPHLAMILVGLFFIYLAIKKNFEPMLLVPIGFGILIGNIPFKIDAGLEVGIYEEGSVLNILYQGVSAGWYPPLVFLGIGAMTDFSSLIANPKLMLVGAAAQFGIFGAYMVALAIGFAPDQAGAIAIIGGADGPTAIFLSSKLAPNLMGAIAVSAYSYMALVPVIQPPIMRLLTTKKERVIRMKPARAVSQNEKIMFPIIGLLLTCFLVPSGLPLLGMLFFGNLLRESGVTSRLAKTASGPLCDIVTILLGMTVGASTQASEFLTPSTLGIFALGFMAFIIASASGVLFVKIFNLVLPKSKKINPLIGNAGVSAVPMSARISNNIGLEYDSTNYLLMHAMGPNVAGVIGSAVAAGVLLGFLSMKEYKYKINGNLYKVSVGEIEKNIAHVEVNGTVYNVEMEEAAPVKVSAPKPSSAPRTATGEPVISKPTSVSSGADAVKSPLPGVVNDILVKIGDTVNVGQTVLILEAMKMENNINAIKSGKVTAIKVNKGDSVLEGTELIIIEMNKKILGVFLFAVFTMSSVWAQGRKGLRINEVLVTNETNYQDDYGCQSAWIEIFNTTFGTVDIRSCYLTNDRNNPKKYPIPKGDVLTEMPPRQHLLFWADDMPNRGTFHVNFKLDPNKDNWIGLYDANGKDLIDSVTVPAGIPADHSYARIEDGVGQWIIKGGDETSGYVTPSTNNVTLDSNEKIEMFSEHDPFGVGMAIMAMAVVFSGLLMLYLMFRLIGQITVFVKKRNAMRVHGISDKEEAKEKGLGRESGEVYAAIAMALYQHLEVHDVEDTILTINKVKKAYSPWNSKIYSLREVPNKKMSNQLEKVQELIELRAQARLGGGQKAIDKQHEKGKYTARERIAQLLDEGSFEELDMFVKHRCTNFGQEKKSFLGDGVVTGYGTIDGRLVYVFAQDFTVFGGSLSETMALKICKVMDMAMKMGAPCIGLNDSGGARIQEGINALAGYAEIFQRNIMASGVIPQISAILGPCAGGAVYSPALTDFTIMAKGISYMFLTGPKVVKTVTGEDVTQEALGGAEVHSAKSGVAHFAAENGEEALSIIRKLISYIPQNNLEEAPLVPCNDPIDRLEDSLNEIIPDSPNRPYDMYEVIGAIIDNGEFLEIQRDYAKNIIIGFARFNGQSVGIVANQPKYLAGVLDSNASRKAARFVRFCDAFNIPIVSLVDVPGFLPGTGQEYNGVILHGAKLLYAYGEATVPKVTITLRKSYGGSHIVMSCKQLRGDMNYAWPTAEIAVMGGAGAVEVLYAKEAKEAEDPAKFMAEKEAEYTKLFANPYNAAKYGYIDDVIEPRNTRFRIIRALQQLQTKKLTNPAKKHGNIPLMNISHIEHLGIAVKSLEEAIPYYENILGLKCYSIEEVADQKVKTAFFKVGQTKIELLEPTSEDSTIAKFIEKRGEGIHHMAFAIEDGVANALAEVEAKGVRLIDKAPRKGAEGLNIAFLHPKSTCSVLTELCENPNKMGKIIGIDLGTTNSCVAVMEGTEPVVIANSEGRRTTPSIVAFVDGGERKVGEPAKRQAITNPTRTIFSIKRFMGETFDQVANEISRVPYKVVRSDNNTPRVDIDGRLYSPQEISAMILQKMKKTAEDFLGQEVTDAVITVPAYFNDSQRQATKEAGEIAGLNVRRIVNEPTAAALAYGLDKSNKDMKIAVFDLGGGTFDISILELGDGVFEVKSTNGDTHLGGDDFDHVIIDWLADEFKKDEGVDLREDPMALQRLKEAAEKAKIELSSSTSTEINLPYIMPVNGVPKHLVKTLTRAKFEQLSDRLIQATIEPCRKALQDAGLSASDIDEVILVGGSTRIPAIQAIVEKFFGKTPSKGVNPDEVVAVGAAIQGAVLTGDVKDVLLLDVTPLSLGIETLGGVMTKLIDANTTIPTRKSEVFSTAVDNQPSVEIHVLQGERPMAKDNKTIGKFHLDGIPAAMRGVPQIEVTFDIDANGILNVSAKDKGTGKEQSIRIEASSGLTDAEIKRMKDEAAANAENDAKEKERIDKLNHADALIFQTEKQLNEMGDKIPADKKSAIESALAKLKEAHKAQDIAGIDAASTELNNVLQAAAQDLYNAQAQQQAAGAQQAQPGADASQSGNNGKDVTDVDFEEVKMLYSSFSYQYFSIRKNTGKTFKMNLPSLLKNYRAYLLFAIDPVTLYMSQTPPFKVFSGTNSRYLAEKICNSLGCELGQMNIQHFADGEFAVSFEESIRGCQVYLVQSTFPNSDNLMELLLMIDAAKRASAKSIVAVVPYFGWARQDRKDKPRVSIAAKLLADILSVAGINRLITMDLHADQIQGFFDVPVDHLYASSVFIPYIQSLKLKDMVVATPDVGGSKRASTYAKYLGVPLVLCHKQRAKANVVESMTVIGDVEGKNVILVDDMVDTAGTITKAADLMMSRGALSVRAIASHAVMSDPASERVQNSSMTELIFTDSIPYTKKCDKVHILSIADLFADTIRRVYENKSISSQYLLMSDEKIVIYQVLPRLFSNMCDTCVPNGAYVQNGAGKLNHFTSKVLREIKKLGANYIWYTGVIEHATKTDYSKYGIRKDNRYVVKGEAGSPYAIKDYYDIDPDLAEEPSTRMQEFEALVTRTHEVGLKVVLDFVPNHVARQYHSDTAPEGVDDLGAHDNKEMHFSPSNNFYYIPRQAFTPQFYIGEGEERYFEYPAKATGNDCFGAFPGEYDWYETVKLNYGVDYTGGGRCHFDPIPDTWYKMLDILLFWCGKGADAFRCDMAHMVPVEFWNWAISKVKENYPSVIFIAEIYDQALYRVYIEKGKFDYLYDKVGLYDKLRGVLCHQVSAAQLTYCWQSVDGIGGKMLNFLENHDEQRFASDQFAGDADKVLPALVVSSMMNTGPMMIYFGQELGERAEDAEGFSGKDGRTTIFDYWSVTTVRQWYDSGRCSVSKLSAKQKKLRNLYKTVLNISRLESAIVRGDFFDLMYVNGENPSFNPHRQYAFLRKYGNELLVIVVNFDDRQANVKINIPDHAFETMKIVSGKYEALELIGGDKEMKELSPEIPFACALSGYGAAVWKIELKNFSKEIQKKMARERENLPVEVRPYRVGLTLSGGGAKGFAHVGALKAMEELGIRPDIISGTSAGAVIAVLYADGYSPDEILDLFSGLSFNDLAEITLPRSCFFKIDRFKHFLQKSLRAVNIEDLSIPVVVTATDLDHGKYVAWRSGEIAERVTASCSIPIIFPPVLIDGTHYVDGGVLRNLPVYPIRPECDVVIGINVSPLVNKQYKQSILDIAVRSYSFMSKSNVIEDMKLCDLFIPMKEAARYAVFDIHALRDIANVGYQQTLKLFTGKHASKINELNKMSGNLNQSVRRTITNTPPIVSLMKSSPKARIPANKKKKYYPGVFFKTASKKRRFVHHYAFVCIIFVFMTINDDIKQACEVMQRGGIILYPTDTIWGIGCDATNAEAVQRVYKIKQRADSKALIVLTDSEAKVEYYVSEVPETAWQLLDVAVKPLTLIYPGARNLATNLLADDGSIAIRITKEPFSQQLCRQFRKAIVSTSANISGNAAPHNFSEISDEIKNAVDYIVTARRDEIKESLPSSIIKLEADGTIKIIREMINSKRQIRRYVLVDYLTSNVSWFLFNIVRFHFPGIAAGESLKMYLLSPRVIEGQILFPLLMMCVYYLSGYYNQPFFKSRIQELIQTLGSVLVNTLFIFFIALINDVLRIRIDNYELLLALYALQFVCVYTGRAIVTGNATSMIHRRKWQFNTLIIGCGPKAIKQMRELEEPRQSLGYHIVGFIRVNHETPAPEAEGRTYPIKQLSSLCKQMNIQELVVAPEENDLAELHKLINTLYPLNLPIKLGTDEFNIISSRVRLTNIYGAPLIDMSNCAISEGEKNMKRVIDIFVSFIALILLSPLFLLLAILIKKDSNGPIFYKQERIGYRHRPFKIYKFRTMKAHAETGIPLLSEENDKRVTKIGKVLRKYRLDELPQFWNVLKGDMSLVGPRPEREYFIRQIVERAPYYVLLHQIRPGITSWGMVKYGYARNVDEMIARLKYDILYLENMSLLVDLKIIIYTIRTVITGKGVMIEDEDIEIEDTQREDRHDLMMRLLMWREKHINEHNFVLILSFIIGICTAAAALILKFLIHFIQQLLTSHFNADSANYLYLIYPIIGILLAGLYVRYIVKDDISHGVTRILYAISQKKSRLKPHNMYTSVIASSITIGFGGSVGAEAPIVYTGAAIGSNIGRLFRLDQRLLMLLVGCGAAAAIAGIFKAPIAGILFTLEVLMIDMTATSVLPLLISSITAVTVSYIFTGYNAEFSFVQTEPFVAARIPYVIFLGFFCGFVSLYFTRIMNRMEDIFRRIGTPWKKFILGSLILSCSIFLLPPLYGEGYGAITSLLNDNLKQLAEGSLFYTENGNMWVMMLFLGLIILVKVLATSATNGGGGVGGTFAPSLYVGCFAGFFFAYVLNHTGLLPMELSDKNFALMGMAGVMAAVMHAPLMAIFLTTELTGGYDLFLPLMITSTVAYATIKVFEPHSIYTMRLAKKGELLTHHKDKAVLTLLKMDSVIEKDFIEVHPNMSLGDMVKVISQSHRNIFPVTDNDNTLLGIVILDDIRNIMFRPELYNRFYVRKFMTMPPAKIEIGSNMDNVMKLFDQTNAWNLPVVENGKYIGFVSKSKIFNSYRRVLVHFSQDMEKQDLRIIYMGTPDFAVESLKRLVEGGYNVVAVITMPDKPAGRGHKIQYSPVKEYALSRGLPILQPEKLKDECFIEQLRELHADLQIVVAFRMLPEIVWNMPRLGTFNLHASLLPQYRGAAPLNWAIINGDTETGITTFFLKHEIDTGEIIQQRRIPILPEDNVGTIHDKLMTLGADMVVETVDAIISGNITPIDQASIQTNEPLRPAPKIFKETCHIDWKKTSEQIHNLVRGLSPYPAAWCEWISPDNNRFGVKIYRTTPLPSKHNYAPGSIHTDGKNHIDIACTDGFIRIEELQLAGKKRMAAPDLLRGFHLNDEFRCEMNLKVKGTILGIVSAVSYGTNPLGALFLYQEGLNSNSVLFYRFSLAAVVLACILFIQKQSFRLSRKEVKTLCLLGILFAVSSLTFYTSFHHMDAGIASTLLFVYPIMVAVIMSLFFKERISPVTMFSIILALSGIALLYRGGTGAGLNGLGVSLVMIASLTYALYIVVINQSSIKLSSIKLTFYVLLFCMVAIVFHSFFDGGNYLQPLTTPRMWLFAIMLALVPTVISLVTMTMAVHAIGSTPTAVMGALEPLTAVIIGVTVFGEIFTLRLGIGIFMILVAVILIVAAKSFSPRKIVSFIGHVVHTVPVRRKMARGRYGHMIKSLIVIGDFFCLNIAYAVVCYWGGGFDGGFGVKIIWLLLNLSYFPVFSLFAKIHELRILHVDRVLIKVTQAVLCHLAVFLLLIFFLQIDNIGARVLLRFYLLLSVLLAVWWIGSRKLLKYFRRKGYNFKKVVIVGAGAMGIKLLDELRSDAGYGYKFMGFFDDNLSLKKSLPNFQGDCSSVEDFVIENKVDEIYCALPMRQEEKITRLLKFSEASNISFYMVPDVGRYIHRQLEFQLVGNVPVLSLHPEPLQNIFSRFLKRVFDLLFSSIVLVCSPIIFTPIAIAVKLSSPGPVFFKQKRTGFKGKEFNCYKFRTMKVNANSDQLQASRHDPRKTRVGEFLRKTSLDELPQFINVFVGDMSVVGPRPHMVKHTQDYSKIIDKYMLRHLIKPGITGWAQVNGYRGETRELWQMERRVEYDVWYIEHWNFWLDIKIIFLTVVNAFRGEKNAFMTTALEKPDMNTEELLAGQTITPAEEEQNSVQSTSRLSREEIIDSLRKLVEGSVEEVKDEVDELKQAYYKQKKIEIEEARNAFIAAGNPGAEFVPMPDEQEETLKSLLSVFREKKAEYTALLEKQREENLERKQQILEEMKSITEDSDNINRQYTRFQELQQSFKEPCELPSAAVSGLWKKFQSYVENFYDLLKINKELRDYDFKKNLEQKTALCDAAEALLANDDVVAAFKQLQLLHDEWRGIGPVAKELREDLWNRFKDASTEVNKRYQSFFEARKEVERKNEEAKIALCEEIESMDLSLLTSFAQWDDATKQVLDLQGKWKTLGFASRKMNNQLFERFRKSCDEFFAKKAEYFKAVKERMAENLEKKKALCEKAEALKDSTDWKATADILVALQKEWKTIGPVAKKHSDAIWKRFVTACDYFFAQKNEQLVSTRQVEQENLENKRGIIAKLKEIDESMDSTEAVKIVRDLMAQWNSIGHVPFKEKDKIYKEYQSLLDTLFSRLNMNENRNRLSNFSATVQQMADTNHDKLYRERERLLRMYEQKKGELKTYENNIGFLNISSKKSGGLLKEMERKMQKIREDMQLIEQKVQLIDKNLMRFKLVLSVKSESFGSVLPVSYQYELSAAVYRRIRENFELYLHWLSSNGFAPIDDCRNRLFSFSNLYIPRIRVEYDRLHILVKRVQMWISFLPVRGTHEFVKQLFSGETFVLGDRRSRVELEVEDIVECPAPEFGEEAEYLALSPIVFMVARPNRSMEYVGPDYPGYADCFYRSVLGKYEKIFGRPFDGDTGFSWSLLSEPKRKGIFMMRFTPEESKVIGYMYKFKLSMSPILHQIMYETGIGEKVNLGFGCVEILRQDTTPNDQNFLSDEKDDTSVKIIMISFRRHILPNGLRIIHHYDGSTKMTALNLLYDVGSKDESPERTGFAHLFEHLMFGGSVNIPDFDTPLQKAGGENNAWTSNDVTNYYTVVPTHNAETAFWLESDRMLSLAFSSESLSVQKQVVIEEFKQRNLNQPYGDSFLLLRPMAYRVHPYRWPVIGKNTSHIGNASLEEVKEFFFAHYAPNNAILSISGSLPFDEAILLCEKWFAPISRREVACRDLPQEPVQTKPHKKIVEREVPLDAIFKAYHMVDRKHPDYQGYDALSDVLASGRSSRLYRRLVMEKKLFTEIDSSITGDIEPGLFLLKGKLSPGISLEQGEEAIEMELRRMREELLEQRELDKVINRFESNDLFSNLHYLNKATNLAYYELLGGAENIDTEVEKYKKLTPFDLRRIAEKLFVPENSSTLWYKSVHAKREIITDVSDMSCESRSHKETVVLMETSLGNIKVKLYDDTPAHRDNFIKLVEEGYYDGTLFHRVINEFMIQGGDGTSKNAPAGKMLGTGDPGYTIPAEFVYPKYFHKRGALAAARQGDQVNPDKASSGSQFYIVTGKVFNPGQIDQLERQMQMQQEQSVFQSLAANHREEIMNMRRNRDMQGLQALQDTLIAQTYEQIKKEGKRTLTQAQREAYTTVGGTPHLDGEYTVFGEVIDGMEVVDKIQQVETGSADRPKTDVKILKMKVVKMKRKILCFVTALLSFFIVEAQQPCTLTLEVSAVTGEDMAGTPFHLERVESGLIYDRVLGENGTYTINNIYSGIHHLVIEKEGLKTYDNSALDIKGDTVLKIKLEEPVRTPYNLQSVLAHDPKTGVNDASLVWNEETDYFFDDFENYTSFTLDFAPWTGIDKDQAEAAMLMQGGYPNSSLKQYATIIAPDEAYVSTTGGDVSWWFYAPQLRAYSGKKYMGFIRTASGTTNNDWAITPQVHVGVNNVVRFKAKAADAPIEKFKVWISTTGTEESDFKPLTQGNYESVKWEQWLTMEYDLSKYEGQDVYIAIQYITQAGWMLMVDDFYVGPAKLNPSSIKARLPKTRRVRKAAESDAPQSYTVYLDEQEIGSVKTNSFIFENLSAGIHTLGVKSVYKVSESDIATTTLEVPATSDYADVKVKVSTNGGSSEGVAVNYLSGSYQVTDTIKSGISHFASLKKGEYMISINDDRFLAVDTLIDIDKDMEINLSLVEKITAPYNLSVDFSYRDTDKKTDVLFRWNQDLGWSDSFEEYDDFATQFGGWATFDKDRLRPYGITINNTYISIPGLEQGESPVMVFNPEKTTPRCDSDAFLNTVFGKKYIMFFGVQSNLSDDWLVSPKQKINKGYVAHFYVHVYPSMATVYPETIKVLASTGAQTDLSSFVELYNYTFTESGWYEVTVDLKDYVDQEVYLAVNYVSNDGWMLKVDNFYVGPSDDAPAPEVGNATYDIYLNGEKKASAITDNSYTFEALDDGTYTAGVKAIYESGESEVEEYVFTTQYSGIENVVVSTVKVYSRDHAICLESIEGENVLAEVYGVSGQLVELVEFENSAQISVSEGLYLVRLTTPQGTSTVKVLVKMETMKSMFFACALLLGSAETFSAENLVLSEDFESQTFPPSGWVVKGTELSEDLESGYAHWSLNWNEVTGCSIAGSGCAEVMSDFKEGQAGISKEEWLITPAVQVADNASLSFTFWCNASSFMTNKYGSFLVKVSTDDGDTWSDLWNAASQEDIENSGLTWPWNKDAMGIENNWQKLTPNVSLEAYVGKTVKIAFYFRSILVNNYTQATLAVDNVKVGNQEIENLPVIEGSTSYEFSNSYIGYLAQSEPMTIRNVGYGTLTITSIEGIEGTDFSTTLDPASVSLKRGEELSYRVNYTPTITGAKSTVMKINTNGGTLSVDLSGTKVMLEEGYTLESFEGDIFPPAGWSRNEGWKTMEGMATSGVKSVTVGGMMTCDIVSPRLDLSAGNGKVKFDYIETTGEEYIDDSFLPSTYFILYYKKNTDTDWTELWCSLDDSKYNEWVQKEIEIKDANGNFVVDDNVYLRWTYEFEMGDGGLDNMVVTDIYFDNVVLPKLYGEGELPLAITTPNPVNGVSNVDYSRLTLSWEPALFADGYELSVGTDKSNPTSLLENEKLEGNTSVSYTIPELEPATTYYWKVVPYNAVGKNENASVWSFTTMEDQSVRDFPYTMGFEGNNGEIPPMGWKNDHEGKGIQMWKSNEIEPFAGKYSASVWHNNAGEVSVLTSPVFAIPETGDIVASFAWGGALCNRLEKGYENEAITEGPISEVNDADGTLYFEIRAVDAADWTPLAYTQDRTKWRHKYVSLADYAGKSVNMRWRFVATENAGVSSGGASLDEIFVGDIKDMPTLAVSEIKKENLTVYPNPTSDYVYWAGGKADVKVYDLAGNCIKDLTEVESVSLEGLASGMYIVSVSCGDSVSTARVMKRMTKKITLVFVLFLFVFGLRAESLLNEGFEGWSTTNFPTGGWTVINDTQEGAINHWTVDNSKSACAGSVSLYCNGGEWDPIEPVKEEWIVSPSLTLSETNYNLSFLWKGASASAFKNEYDFQVRITEDDGKSWKTVFSFLDQSMVENSGVAFPWTGWVTNTSKISLGAYSGKTVKIAFVHCLLVSGAGKGNSIWVDNVVVETGEAIDAPIADVNPTSYIFDGTYIGVGKWSEKFVLRNKGVGNLTVSGISGLEGSDFSTNMIPSEVSLRPSVEYEFYVKYTPSSELSSKSATMTIHTNGGDVSIVLEGTKIILPDEYNLESFESGTFPPVGWTADKGWTTSRTYATSGDYSASCSFAENNPTLVSPRLDCSTGTHELQFDYANVWEPTADDAPAPESEFEVYFSKNGKETWEKVATCDSINQWWHMKLDLGSPASDNCYIMFKYVLDVDLSGGWDDVPEYASTFLDDVVLPPFYGRTSVPGAATTPSPENGATDVFNEDIVLSWNGVQFAKGYKVYVGTSTTDFSVVPGTEVEGCSYTIPVLDYATTYYWKVVAYNDMGETQNPSVWSFTTLADQTVNTFPWSEGFEGDVFPPLGWKSEKEGYTAWDRSNYNAYDGKNAAYISAGGSNEQGILQTPMFVLPADKDMQVSFYWGNAVPSGLTKSVKETMTINKDTLYFEIKSDGTWQELAHISSAQAEGQKWVRQRIVLSDYRGKNVNFRWRYSAVDFTGSGGALDNILVEEAPVGGKAVINVTSWNAGDVNYNKAVTSKTLNLLNDGEQTMKITDVSFKNKNFSTSLHKDLVLDSRESVDFNITFAAGETDALVEDEMTVTFDNAPAVTLPVSGNALGMYTRYFSFEDDEFGSVAPKGFTTVDADHKATVQPLMINYPNIGNAYAYIVINQQPEPEGADWRNIYPRSGDQLLATMATADGTEAVDWIISDQMTARNDAKFRFYAKSYDGDNTYHPWAYLTVLVSTTDNAVSSFTPLSGFTSVQVPHKNNNDSQTSWTEFDVDLSAYAGQKIYIAVRNNTPSNGFVTFFDDFYFENFEYVNSDNSAPYFTTVPETTATVGKKWTYNYSVADPDGDPLTVTLQGKPFWLNHTPGTNGGTITGIPGAEQEVIMKLSVSDGSKTTVQEIILVVTDGSGIEGVNGDRLTVYPNPVVSTLYLNELCDKVVVTDISGKQLLFAEQVESVDVSMLSSGIYFVTMQLGDQVNTTQVIKRMNNDLKKILNSDTDGLLTYEYIANHMGSCDEDMPVLADNIIRVDMTGQITVSAALYLHATGAEKYREIIDKLIAASLSKDREHKYIVDLLSGIWGEDYKLHAEELKQESDNFRRIYKRVYVNDIIMNDNLIITIGRQFGSGGREIGKRLADLFGIAYYDKELINEASKSSGLSTEYFEKADERAPSALLNSFSINWLTGAGGIWGDGGLSNEYIFKFQSDVIRHLAETQSCVIVGRCADYILRQYPRCYNVFIHAPLEDRIERIISRSQGMTRKEAIELAEKKNKLRASYYNFYTDKGWGVASSYDLSIDSSILGSEETAIFIRDFIQKKDGLPKWEKKKMDRLNFAAIDIGSNAVRLLIKGIYPGESVSDLSKVFIVRVPLRLGQDTFTKGRISTEKTEKLLRLMHAFSQLMQVYNVLSYRACATSAMRDSSNGADIVRYISERSGINIEIINGLEEARIVYDSHIVDELEQEGDFIYVDVGGGSTEISIISDRSLLQSQSYNIGTVRILNKKLSRSELFRMYRDLKRLKETYRHISIIGSGGNINKLHHLAGVSAREPLTVERLLTLRNELNSYSIVERIDRFALKPDRADVIVPAADIYLQIATHIGAREIWVPTIGIVDGIIYSLCSDYLKEKENMNFHSISLVFTLKTIVEEQICAINEVIGYTWAIAQFPQSGKQETPSYFYFQKFNQMKSRITFNGMNRYSPPNSAQPGDCTAIVNLRNQSNCLKPVGTPEYLYTPEKKNHRLVYVHICYDGEHHITENENTLYYEALIKKENGNIQKESSQLFELNDLQVLSIQSIGNTLIIICTESIYYLLYKEGKYIFLGEKPDIPEISFFPYVEYTDAYFVSEYTFQHGYSNPTRLDTEDINYYNDAYYNAFFQLQEKAWKRHYFIQPILIRYALTLYDGSRIFSSAPVMVSLPHPIQPYQMSIRLKNSNNLCLGSHEGQIIAGNYSLKYYIHQFNLDNWKDIVRSIDFFVSPEATIFEPDQKQQGLKFTIERTEENETISFLLKGDISFLDLKEIKKRYLQDSLFYKIATIEDWSDWKEGESYTIENKIRPDLLIHEEVLSPDNTTLLSTGAHVSYIHNKRLHIANLKKKLFPGFPLSLFNVGNKNAETVSAYICTYLKTERGECKVVWHGKSNYFFNQLSPLISYPDSNAYKMEIVVKSEKTRYKGSFLLTASEYENRADYLDETLSAITLENDSLPASTPLDIPLSENDTYTQPNILRVSELENPFVFPSEQTYTISNGEITGIATITAALSEGQFGEFPLYVFTEEGIWALQNGNGIVCYGAQHQLNREPILPENPIVPLEDMIMFTTAKGLFIIRGSEIQQLLSFDETACENNSPITHHDIDSTLIPATTDQTTLSQFIQGSIIAYNTIEKELICCRPDLKYSLIIHIPSLYMYRISRQYSSLFYDASHLLAQDAEGKVYDLQKESAEITPIALVSRPITLQSEEYQKWREVFWRLSMSEGKLLLSLWGGNDAEGNFSKICEISSASKVAGQLPMRFTGPAYKYFRLILCGNVSSDFHLSSVDIHSENIISNRLHMKRLIFILMALLSYGILRAETLKSPDGNIVLDFELDNGVPVYKVDYKGRPVIKESKLGLELKSGKNLTDGFRLAGSETSTFDETWKPVWGEVKEIRNHYNELEVTLEQPSTDRRMIIRFRVFDDGVGFRYEFPDQPNLDYFVIKEEKTQFAMAGDHTAFWLPGDYDTQEYSTVTSKLSEIRGLMNEAITPNSSQTPFSPTGVQTALMMKTDDGLYINLHEAALVDYSCMSLDLDDKNMIFESHLTPDALGDKGYMQTPAKSPWRTIIVSDDARDILASKMTLNLNEPCVYEDTSWIKPTKYIGVWWEMITGKSTWAYTDLPHVKLDLVDYSRLTPNGRHAANTEHVKEYIDFAAEHGFDAVLVEGWNIGWEDWIGKSKDYVFDFITPYPDFDVEEIERYAKSKGVKMIMHHETSGSVRNYERHMEKAYQFMNDHGYDAVKSGYVGDIIPRGEHHYGQWMVNHYLYALTEAAKHKIMVNAHEAVRPTGLSRTYPNLIGNESARGTEYESFGGNNPDHTTILPFTRLIGGPMDYTPGIFETDISKLNPDNHSYVRSTLARQLALYVTMYSPLQMAADLPENYNRFLDAFQFIKDVPVDWDDSRYLEAEPGDYITVARREKGGNNWYVGSTVDENGHTARFSLDFLEPGKKYIATIYADAPDAHYKDNPQAYTIRKYIVTNKTRIVQPCAPGGGFAMSIEEATDPATLKGLKNYKPMSGLGAYSAFAALQSADPQSSSSSISATQSNKESDSIQVRYPVTKTSPESYDEIGQIAPMDLKNPSNLKTEVEYDAETNCYVIHTRVAGVDVCTPFMLSAAEYNDYTLCKSMQQYYRERNAQNFAENSKSEFNFLDMQFSLGPLEKVFGPGGVQLKTQGSIELNMGLKHNKLDNPALPMSSRKKTYFDFDEKIQASVTAKVGDKMSFNMNYNTDATFDFDSKNLKLQYQGKEDEIIKNIEAGNVSMTTGSSLIRGSTALFGVKTTMQFGKLTATALISQQQSESKTVNASGGAQTTPFEIRADAYDENRHFFLAHFFRDNYDKFASKLPYVSSGVSINRIEVWITNKQGNYEESRNIVGFMDLAENVHIGNDHWISATAQQNPMNNSNSLYAEIKNGYPDARNINLVTQALEPLSVYGIEGGQDYVKIESARKLTSSEYTLNSQLGYISLKSKLNADEMIAVAYEYTYNGQVYQVGEFSGDVTDTDQCLFLKMLKGSTISTSLPIWDLMMKNVYSLGAYQVQKDKFRLYIKYQNDSTGVAVNNIPEGNISNQTLLQVMNLDRLDANESEYSDGIFDYIEGYTIQSSNGRIIFPVIEPFGSHLAEKIGNAAIAEKYVYQELYDSTLTIAQQVSEKNKFIMTGEYKASSGAEIRLNAMNVPRGSVVVTAGGMTLVENSDYIVDYAMGVVTILNQSIIEAGTPISVSLENQSMFNMQRKTMLGLDLNYAFSKDFNVGATIMHLSEKSLTEKVNMGDEVLNNTLWGVNLSYNTNFLWLTNLLNKIPTVNATAPSTLALTAEFAQLIPHKSKNGSSQGTSYIDDFESTQTGLDLKSPYSWTLASTPYDPSSDALFPEARYSNDIRYGQNRALLSWYYIDRMFTQKNSTLIPAHLKNDLDQLSNPYVREVSVREIFPNKEINYGESTTLQTLNLSFYPQERGPYNLDADNIDSQGLLLNPENRWGGIMRKMDYTDFESSNIEYIQFWLMDPFLDENQTNHNGGELYFNLGEVSEDILKDGMKSFENGLPVDGDTTQIATTVWGKVSKRQSLTYAFDNTSGARALQDVGLDGLSNDEEYGFPSYRDYLDKLETKLSPAVVEAMRQDQFSPFNDPAGDNYHFYRGHDYDDAQTSILDRYKRYNGTENNSRSPEEMNDSYYQSSKSVPDVEDINQDNTLNEYERYYQYRISLCPDSLEVGKNCITDKRETTVRLRNGEEGKAVWYQFKIPLSRPQKKVGSIQDFKTIRFIRMFMTGFECETHLRFATLELVRGEWRTYNYALNLKGDAPAQGKMDISVVNIEENAGQVPVNYVLPPGVTRIIDPGQSQITQLNEQAMSLKVTDLQSGDARAVYKNSGMDMRTYKRLQMFVHAEKLIDDKTNLRDGDVSVFLRLGSDSKSNYYEYEVPLSLTEPGNYSTYNAQDQEAVWPQSNMFDFPLSLFTDLKLERNAKKRMDNSTVTFQTRYSSYDPDKNQNKVTIVGNPSLSDVRTMMIGVRNNSNAAKDIVVWVNEMRLTDFDQSGGWAAKANVNLGLSDIATLNIAGHVETVGFGGIDQSLTERRLDDYYQYNIATMVELGRFLPEKVKLKAPLFYSITEQRTSPKYNPLDQDILLKDALDNAGSKAERDSISDASIEKSTVESFSLSGVSFDIRSKNPMPYDPANFSISYSYNRQSKQDPTTEFENTYDYRGSFTYSYTPFVKPFVPLKGLKSKSKHLKFLKEWEFNYLPNNIAFNTNMSRYYYEQQIRDVSGSGGMALPTSVSKSFLWDRQFSLTWNLTKSINLSLQTMTNAHIEEPVGVVNKQLFPDEYEAWKDTVLTSIKNLGTPWNYNQTFNASYTAPFSKIPVLDYLSFNAKYNATYTWDRGAQISEEIDLGNSVNNQGQLSFDGRFNFEQLYNKSKYLQKINKRFSSNNRAAAAKKNRKFERTILLREDTTVTLRHNLNNKKVKVVARDDAGKKVALRTKVLDANNVVILDKGTQRLNVIITPSNKNERNFWKEAAEYSLRGLMMVRNASVRYRKTNTTSLPLFSPNVGDVFGQSTSYGPMAPGLDFAFGFTDESYVYRAKERGWLLCDSTQISPAVIGRTEEFNFEIALEPIRGLKINLTGNRTDTRSSQMQFMFDDMPTVRGGSYTKTHIALKTAFRSSSAKDGYSSQAFDDFLKNREIIAARLEAHYGSLGNYPNKGFIASTGFGDKPYDSANGGVNRSSADVMIPAFIAAYSGRDARKIDLSPFPGLSAILPNWRITYDGFMQIPFIKKHFKAFTLSHAYQCTYAVGSFTSFLNWVESDGDFGFVRDELTGNPIPSSPFDISSVMITERFAPLIGLKVTLKNNVTGNIEYKDSRTLTLNSAAGQIVEASTTDFTIGAGYKIANFNTILKLKGSQTGVSNDLTINADFSFRKNQALIRRIEQNFTQATSGTRTTMLKVTANYVLSKRITVGAYFDHQINTPLVSSSSYPITNSNYGISVRLSLLKMIEYITGEVTDLTPATAVVECMGIGYLLNISLNTYSCLSKGQATRLYVYEAIREDAYQLYGFYDRHERELFILLISVSGVGPNTARMILSSLNPSELEQAIVSENLNLLKSVKGIGAKTAQRVIVDLKDKIKPTDNPLVISTPAASEIYEEAVAALVMLGFSQPQSQKTVQKLLRDTPSMRVEEVIKQALKMLMNSFDTKFYSLDTNVIKVDSGTNKLLGFNAETYILLGIKSRKKYGMKKVFLIFLSLIFIFTFQVKAITLEDITSGKFQSKDIAEVYPSADGVHYFTATNGNTRIVKCEYRTGHEVDTLFDVKTARECNLEQFDGFSLSPDEKHLLIYADSEPIYRRSFKATYYTFEIRRNLLKPLSDGGKQQAAVYSPNGRMVAFVRDNNIFIKKLDYGTEVAVTRDGERNKIINGIPDWVYEEEFALTSTLQWSPDDATLAFVRFDESHVPEYSFSLYEGYCPTYPEYTLYPGRFTYKYPVAGETNSQVSVLSYTVETRALKTIKLPISSDSYIPRIKFTTDPNRLAVVTLNRTQNEMDIYSVNPKSGISKLLLRETDKAWIEESILDNISFYPDFFVIASSRSGYQHLFRYNYNGTLAKQITKGEWNVSAFLGYDEKSRSYFYESNQEGPLYKAIYKINEKGIETKLSERIGTNQASFNPSCTYFINKYSNSNEPLLVTVCDAKGKVIRTLEDNATLKARIAQTDLPRKEFFTCPNHAGDQMNGYILKPTNFDPSKRYPVVMSQYSGPGSQSVLDKWTIDWEYYLVSKGFIVACVDGRGTGGRSRAYETSVYMQLGKLETEDQVAGAEYMRTLPYVDDKHIGIYGWSYGGYETLMAMSTSNGTYQAGVAIAPVTDWRYYDTIYAERFMRTPNENNEGYEQSAPITHAEKLKGDLLIISGTADDNVHYLNTLQYSAALIEAGIQFDTQIYTNKDHHIRGCNTRHHLYSKVCNFFLDKLKMEKKKSNKISWSTIYSLGLVPAILVWGLAPSLKENVIVLTSIIVGIIWIIFSRLYLHFFKGCGIIGWITGWSMIFGGITKAFLLLFGYYNIPIVLFWAPCMAVILYLFEHRNIHPPFCYQCILKRGGIRERHLLGDFSRYETHYIVRLILIGSILVTMLSWILFAFGVERQSRAGNYFYFYFPLGLSIAIIIFEIIRRLLIQQLIESHEKKCKRYINDKTNNPDMDYFFTVIRIMVIGQEKIYLIENKGDEIEFNSGKGFDIPIHRYTDYCTTQEEEEQKARQIIREELQIEKPDLRHISSAIAEDSWRRVGHYVLFISDEDQNKLNRYNGRWYTIEEITRLFHSNRLYPLFKEIYARFYTIVNTARTYYSNGKRRYPIRGYKPSFTLHRIDLLDIELDDPVWLYVSRHNDDRLLYRIDKWIRKILGKKCSSSNCCDAMLDLITILGPTASGKTSLAVALAAHLDTEIISADSRQIYRSMDIGTGKDLSEYTYEGHAIPYHLIDICPPGYKYNLFEYIRDYNTAYADIINRGKTPILCGGTGLYIEAVLKGYSLPPVPENKALREKLAEKSLSELEEILKNYKTLHNQTDTDTCKRAIRAIEIAEYYSRQEPEKLIPNPVKNALIIGVNIDRESRRAKISQRLRDRLGQGMVAEVQGLLDSGIDPESLIYYGLEYKYITEYLIGRTSYDQMVSLLEIAIHQFAKRQMTWFRGMERRGFSIFWLDAALSLDEKIARIDEKITQSVMAGTYLLEMIILFLYKFKTASKFLLAYIKKFYEYCKQEISRKGGCVGINLTSFYLNMSSMEAKVEILWNSLLLTWSYDYRVAGIHTFDKDGLAIGENLIERLNLETSWGTLTILETTDTSITFIHNGTRIILADGAKYHFEVPQVLPGSQGDFYIELICSQVRLTHWDEFFECSRQFTVDKIDWDLMQDGDVDSALLIAESIAEQSPESLEIIAEYMAVADNLGSTEAHEWLRDYYSPGDIAEPYSMIDFSKEHKTLLSRLAKSPNDMEARADLLRCNCLWAEENIKGNKNTWQNANLIREVLQYGPLLLETGEMSMYDLVYKTCDRIKRTIFSHPRLSVKILELEREALYRIEAETGHELGITEDVQHEISLLGTNIWYADRGEYDKIKNEGHLKHDPVEWTARWEEVIDEAEAKAYARLQEHPQGMGFCHAYWPTLSAILAEDYDIQWRSPSQMNPKVLFDMRKILLVVATVMCMGGAFAQLSMGPKLGLNVSSLTGDGSNFRAGMNVGIFANYRINKLLAIQPEFYYSMQGAGFDDIPVLTKTLESNYTSHYLNIPVLLKIYPWAGLNVHFGPQFGFCVDDEYKAKLAGKEISSKDLEPYGYGYKAKTFDFSLALGVGYEFDFGMTIDARYNFGLSNVYDEEGSPNNTMFMLSLGYKFDLMANNSYKNPSMKQLDILKTENEIERSHYPILLQAQKAWENIEHFRQKRKRNRDYTYGKQWNDLIKLPDGRVVSEEQYIREQGKVPLKNNLIRQMVKAVLGQFRNNQTQPVCIARDRQEQSLGELMSTAVQYAYQHNRLQELDSRTLEEFLISGICFQKIGYGHRRGKTDVWVDEINPNRIFFNAMEDSRHWDCTLIGELHDMSIAEVISRFSFGSRARAIQLRNIYSEADNETIRHNFENLTAKAIDRLDFFMPANQDMCRVIEIWKLESREVLNCHDFRSGEYYHIPVTEAEDINKENRKRVHEARTSGQPEETAQLIETEWSIMQTWRYRFFSPLGDLLDEGETPYWHGEHPYVFKLYPLIDGEVHAFVEDVIDQQRYINRLITMIDFIMGSSAKGVLLFPEDQIPDGMTIEDIADEWTKYNGIILFRPRPGSPMPQQIAVNATQVGAYEMLSLQMRLFEDISGVHGAIQGKAAQSGTPASLYAQQIQYSSTNLLDLFESFKTFREDRDIKIMKTIQQFYSDNRYLNLAGNNYGKEISTYTPEEVRNTEFDLSIAETLSTPALRMASNEFLMELFRSGKISLEMLLQNGAFPFADKLLQAIHQSQAESTQQNTTPQIMAKESVAILKGRIDVSEVLDELNAALSEEWLAFYQYWVGALVVKGAMRGDVQREFQEHAMEEFEHAKLIADRIIELEGVPVLDPKKWFDLAKCAYTPPTDVDVVKLLKQNVAAERCAILRYQTIAALTDGKDFTTCDIAKHILAEEEDHEQDLQDYLDDIAHMKEYVLQKMVHHDTYNSTSIFTRTDILTFILGIIEIEEIRIKMKLVALSFSHLSLYLMKNIRTAIIGAGYRGRYLITLLQKINLFDIIAVSDISPNLSEIISQLFAGEKIPKIYNSGTDDYRRMLNENTIDLVIIASPWHLHKEQTIEALKSGCHVAIEVKGALDIDEYPDIIHESRQNKKQVFPLENTLFRNDILAINNMIHAGIFGRLVFLQGGYRHDLTHILIDQTGNFGVQNGSESEWRSKYYETENGDLYPTHGLAPLCMFLDINHTDYIKSITSFSTKPGLGLHACMAKRNGMKYTDIHQHTFRMGDVVTSILQTDSGAQINLLHDTTLPRPRSLNYEVQGTNGIWNAEKNAIYIDGLSPFEEWEPEDKYIKQYKHRFWQQWESEALRYDGHHQGMDYIMLRVLGEALQGRENYPATLEDMATWAAVSPYSKISIQKGTSIPFPHFMTNALFWLVPISSVLALLFAWYFYKQLMKTDEGTPQMKKIALYVRRGAMSYLRQQYKVVGLVFLVLVILFSIMAFGFGVQNKWVPVAFLTGGFFSGLSGYLGMKTATYASARTANAARTSLNRGLRIAFRSGAVMGLVVVGLGLLDISFWYLLLNAVIPAEAMNPAHKLCVITTTMLTFGMGASTQALFARVGGGIYTKAADVGADLVGKVEAGIPEDDPRNPATIADNVGDNVGDVAGMGADLYESYCGSILATSALGAAAFMGAGETDMQMKAVIAPMLIAAVGILLSIIGIFSVRTREDAKMKDLLKSLSFGTNLSSVLIVFATFGILWALQLENWAFIGGSVIVGLLVGIVIGRSTEYYTSQSYRPTQRLSESGKTGPATVIISGIGLGMISTAVPVIAVVAGIILSYLFASGFDLSNVTLGLYGIGIAAVGMLSTLGITLATDAYGPIADNAGGNAEMSGLGEEVRKRTDALDSLGNTTAATGKGFAIGSAALTGLALLASYMEEIRIGLTRIGETVLEFADGTSVLISEATFTDFMRYYDITLMNPKVLSGMFIGSMMAFLFCGLTMNAVGRAAAHMVEEVRRQFREIKGILTGESEPDYERCVAISTQGAQREMVFPSLLAIVAPIATGLIFGVSGVVGLLIGGLSAGFVLAIFMANAGGAWDNAKKYVEEGNFGGKHSEVHKATVVGDTVGDPFKDTSGPSLNILIKLMSMVAIVMAGLTVAWSLLMKNSSKFNSLGGFPDLESFKDESGKYGYREKKTQKIFIAPQFDAAYSFHEGIAAVKVDHKYGYIDRHGLIVIKLDYDWASSFHNGLAMVERNNRYGYINQEGKEIVPIIYEHIDDFHEGLAPVKLNDKWGYVDCSGKVVIPPRYDDSWCFNESLAAVRVDEKWGFIDKTGHLLIPLQYDYAWNFKEDVAAVKQNGKWGFIDKAGQEFLPFLYDEADSFSKGFAEVKMDTLWGVIDKTGTWVKNEDCIMLNLFLTALPLLGNYLFSQKNKKQSQQTIQTNQKRYEQKLSQLDSLFNRNYYSNILDRSDVRGLLGNLREQMSETTRNLKNKATITGATPETVVTVQKSQNQAYGNAVSQIASQAATWKENTLQNYLSARSALEDFYRPLKSDYMNNILGKTFPSFNPLQNLFNPNTQFMDTIFTTENSQPTKTLADYINEGKSFLEAYQAQSPKRLARGKAYEQVEMLKELLNLLHQPDNTEVQQVTDVLIPKTYPEKEKRFLNYLSWLTFISDRNKPKHPCPPLSEKILLQAFRMGRNEFERKHHIFNLLVSIGYPLQQAGLLAKYLDNNIHMSTLNPDLLQEGNGIYGWDLINPYLQEWYRKKENGENEESPAFIAPLPGENSVVPFPSIPKQETPIPLKPDYPINPEPEIPIETPRKLKSLTEGINLAGERIWNDLKYSRGYIQDKLSDSEMSEAAQKALERLPEYQRSTESQLQNKEDSLQNETEHSTSDRPRLELKGLEEYRRLRNENISPNEISRQLSETARWGNEGKKLMEEARMANNSFPETEGWATIGEIIANIGRVGIPVAAGAAFAPAGIAAGIANVASSVAESHAQAQMELDNFEQETGQRLTDGQRTGFVAICMGADLLFDTILQSRYLKNLKSGAKKKASEYFKKTILKNQTAQTEISKIMSKLSKTDKSALIAGTFNDAVTGGTAEALNSVAHDMAKTIYNEPGQYPTLESILQNATTGMVSGSLGGAAVGGTGRAINLKKRNMRRNKQTTTALVDQHGFAWEVLDYNPENKIAEVLSPNGKNTINVPDIEPDMIHFFSVGEYKNTGKIKREINEPDPFAPIIPDQTKDKVWQKMSTRGKYRLTKDLAERMGLDNVIVYEHESDLPVSVRSLKKQGGKIGGYYMHNGNIGIVLDNIPSYTRLQRVLLHEAIGHQGLDALFGDSYFKDEFLMKVYRSMPSEWKLRGNSWNARKTDAEEYLADLASNGVSSSAWNQIYGELRNMLRIFIPGLNFSEREIRNILIRSKNALKKDDSISEMNKKIRQRHLNESDDLGTPLTESDPETYRFLWENDPEWKNYKKFYDHVYGERTDINDMSYNLLKGKRGIIFGALNEMSIAWKVAEKAVEEGATITLSNTPMAVRMGEVNTLGEKLNAEIIPADATSVEDLENVFKRSMEVLGGKIDFVLHSIGMSPNVRKKRPYDDLDYDMLSKTLDISAVSFHKMIQVAKKMDAINEYGSILALSYVAAQRTLFGYNDMADAKALLESIARSFGYIYGREKNVRINTISQSPTMTTAGSGVKGMESLMDFANRMSPLGNANADECADYCIVMFSDLTRKVTMQNLYHDGGFSSMGMSLRAMTQYNKSFDEYRNENGEICYGMNNKFFYFVLSKSRPIFDKVKYTDKFSMGAAFFILKVFNKMSKPYVVGIDIGGTNTVFGIVDARGSILATGSIKTQKYTEITDYVNALHEELSRLLAQENVTDQIAGIGIGAPNGNYFNGTIEFAPNLPWKGVIPLAQMVREKFNIPVTITNDANAAAIGEMTYGAARGVKDFIMITLGTGVGSGIVINGQMVYGHDGFAGELGHVIVRRGNGRLCGCGRTGCLEAYTSATGVARTAREFLELRNDESTLRQLPIQEITSKDVYDAAVSGDKLSQEIFEYTGTILGEAFADFIAFSSPKMIVLFGGLAKSGELIMRPIREAMEKNLLAIYKGKVKLVLSELKESDAAVLGASALGWEASMNKEELSAQRAEKWREELRRSRKAKERTDIPRVKMKELDPAYRITNREEVNCGLTREQAVLEATRCLDCVEPLCMTGCPVGINIPKFIKNIERGDFLSAARTLKETSALPAVCGRVCPQERQCESKCFYTQKLKKEPIAIGYLERFAADYEHASGEVALPAMKPCNGVKIAVVGSGPCGLSFAGDMAKWGYRVTVFEALHEIGGVLKYGIPEFRLPNEVVDVEIENLRRMGVEFMTDCIVGKTLSYDDLHEMGFKGIMVASGAGLPRFMNIPGENLNGVMSSNEYLTRVNLMDAANPDSDTPVWRGRRVAVIGGGNTAMDSVRTARRLGAEKVMIIYRRSEDEMPARKEEIHHAKQEGVEFLTLHNPVEYIGDERGRVCQMRLQKMELGEPDASGRRSPVPIPGAIETIDIDEVIVSVGVSPNPLVPNSIEGLEVTLKGTIVVNADTLQSSIPDIYAGGDIVRGGATVILAMGDGRRAAAAMHKALQEKMNKIVAKEYFSEKVVKFVVEAPLIAKARKAGHFVIVRVGEKGERIPLTIAAADVKAGTITLVVQAVGKSSSKLCALNPGDYITDVVGPLGRATHIEKFGTVVCCGGGVGCAPLLPIVAAMKEAGNRVITVLAARTKELIILEKQMREYSDEVIIMTDDGSYGNKGLVTQGVEAVINREKVDLCVTIGPAVMMKFVSLLTRKYDIPTVASLNTIMVDGTGMCGACRITVGGKTRFVCIDGPEFDAHQVDFDEMLMRLSSYKDLESKMNKLMKSLCGTLWIALMCPSCDSAESYDPPIDLQKSCVVERIGDALYVSSKLDESNDIVYVFEKCMFNKLYTFSKVGVVANSSSKPVAHSQDVASMTLLNEATSDNIGPFELMAGGWCGGNHSYADDNTTRTAFTDKVIIKCNDKELTGDAVLNATDVRVYVWSYIYNPASAYQEDGKYLFSDTLCKEFSSYNICRNTINVEVTHTYMNKSSVTVNRYYGMQSMFKDEECTFTPEGEYIGWIPQAQVDRFTKTNYPNFHRFIEKSSTAYQSAHMFNEGLGTRGEVDASDVVFIGNSYGKSYHKVIGSKSRSKGDTDYWKGAYTWFVSPVADDEDLLCYCGYIRDKEAVYIDFKKAANRQIALPERFVGKDFAIYESSEGVSCKWSETQGTISVVANEAGSCVIVFMKIKSFLWILLFGVFCSNSMAELPKVIAHRGYWKTPSSAQNSLRALELADSIGVYGSEFDVWLTKDDVLIVNHDAVINGMDIESSSSKMLLKQKLKNGETVPTLDAFLNRAKKLSVRLICELKPHKDKQREAEAVKRIVEMVRKKGLEKRVEYITFSAEGLLELIEQAPKGTPVYYLNGSRLPKDLKFIDAAGQDYHINVFREHIGWIKECHDLGLKVNVWTVNSLEDMQWCIDRGVDYITTDEPERLQELLRSQRSFHDVTGFLPVYGKLRDCKNPLYSRLSSDMQPTVRKALWNLSQNTAGLYVRFRTNSTSVGARWTVKYNNQFNHITATAVKGLDLYCLQDGKWQFVNSAIPTGKENHVTIVKNMLPQEREFMLYLPLYDGIDKLEIGIDPGAEIVASELNSPDRENPIVMYGTSILQGASASRPGMAATNIIGRRFDREVVNLGFSANAFLDKEIAELMSEVEASAYVLDFVPNASVSQIKELTIPFYRILRKKHRTTPIIFVEDPQFPSAVYNRVLADEIREKNEALQLVYKELQKEKEKNIYYVPSQALIGDDYEATVDGIHFTDLGQFRYAECIGDCLERAFRKNTIKDLALIYQGGINRMDWTEEQFRPYVMHQFQDGRKEWLFDGFLFLEFSDGKGRRYAQGYGKDARKQEWEWLLQRLFEEGKSLSALDACIETVKKEIGEPEFRHRVVIGLPAAMFRQRDWGELNGKTLCFLYREDQVAATRWYVDRVLESFRNANYKNLDLAGFYWVDEDIAYNGDLSLSVSEYIHSKNLLFYWIPYWKAVGYDKWRELGFDMAYLQPNHFFEENIPDSRLEEACKESEKNGMAIEMEFDSRALSDYEPVSFRSRMKSYIDVFKDNGVFFDLPIAYYSGSRAIYEMYKSEDERDKEIMDELCELIVERHKKMKCVDRVWIVLGFLFCSLGSAGGSLRLAEDNIDEIVRQMSPREKAMLLVGCESLVSKDSLTVYVPGAAGYTKSFPQYGIPSTVMADGPVGVRIFPIKVDGKRHYCTCFPSSTLLASTWDTQLVETQAGAMGEEAAVYDVDVILTPGINIMRNPLCGRNFEYFSEDPVLSGLMGAAMVNGVQSRGIGTSLKHFVANNQQVNKLNNDSRIPVKALREIYLKGFEICLQHSNPWTVMSSYNKIGGILTQSNAELLRTVLREEWGYDGLVVSDWYGKRNSPEQLEGGTNLLMPGEKAQLEEIEAGIKSGALSMEVIDDAVKHVLDYVVKTNAFRKDIHAALPDLEQHATLSRSVAGQGMVLLKNGSCVLPLKGIKNISLFGATAYHSIAGGGGSSNVNKSHIVDISTGLEQVGFVLDRSLKDLYTKYNAYQEALLVDPKATDWERLSYRRYVYPEMDLMPNKTLVGEQAKSNDMAVVVIGRGSTEESDRKVHDDFNLSDSEIYMIDKVCEEFHARNKKVVVLLNIGGVVETASWKNKPDAILSVWFPGQECGHAVADVLTGTVNPSGKLPMTFPVRYSDIPSSKNYPTVGETLSGENFDYTSYEEGVWVGYRYFTTADKAVSYPFGYGLSYTEFLYSEPSVKKEKGRWVAKIKVTNVGAAEGHESVQVYVGAENRASENPLRELKAFGKTKLLKPGESEILTMNFTDYDLAHFDEPSSSWVLEKGLYKVSFGASCEDIRSVRDIKVKKQQRWGVNRVLNPVVPVQTMTIDMKRLISCVLALLYVMAGFASGTWILHGKEYRVDTLYHAYIGPGTTQTSIKLAGPVNLRVFYTTTDLKNENVDVRAIKHKDTLTGLGTVSNAAESHSTSNRSYFAGINADFFSSSMPCGITVVDGEVYCSDQASGWSLFGIDANKIPYSGGGDFYVKLTAPDYSTAELSAMNLERGTNGLVLYSSRKGANTGTDSNGSEVVLIPDGEGNFLTPGATVRMRVQGNPSHAGSMPIPDDGYILSGSGTKESFVSNLSEGDVVEVRCAIRFNGFTGGKIQQALGGCPMLVSGGKVLDTENALDHLTSAQPRTAVGYNAEKNKLVMLVADGRSSISVGPISKVLADIMIYAGCSEAMNFDGGGSSTFYVKGEGVINQPSDGSERSVTDGLYLSTDAPQNDVTITTIRFMDYAKTLNQGDAYTPVIYGYNQYGVLVDRNVEGVTLSCGSSLGTITNDGTTLNASGSGTHMLTAGYGNLTTSLSVTVIGESGISSVDNSQALMIYPNPVEQGTAISVDLQEVSDALLSVCRSDGVLVSRIAVNAGEKSVSFDTSEWDRGMYILNVIQDKNVKSLKLIVKMKKQLLLSAVALFSVVGVSAQLATITQEWKTPVGDATNMRQGTYANGKFYIQNKNDGTVDVWTKDGKESTLTSTQGSMGICVDDAGNIIVQNETGTFGTQTGDSRPIRIYPAAGGEAVDITLILPSMGVTCGRSDFFGKASGNVLSEEGGTFYLLCANSPYVYILPIKNGAQDVDNMNAVDVSVAFENSNDGTLKGTASTQTIAYEYDGDIIIHERKCGVKRMHIGEDGNATKVKDYTIVPLKEETESMICFPTDMVGSCFFTIGDEDYLVYSQRYYSTEVAYESGFAVLRLSDEEKVAEMKSQGTNILANPAFGQWFAAVPVSDTQAEIYHYFPAAGANNAFISKYIFDLASSSVEGVETTTAKVVANHGEINVIGNANSVEVYNVGGILISKDEMNVKCNAGIYLVKVDGKVSKVIVRMNDKWFLGARRVFFALFACWVTLPAFATHRALVEETADAVKVGNGSVELIVPKGKAFNIQSMKLNDGEEMVVPSTNAIPWVLTYKGIQGENPMLFPEHGVYKGYEVIQNDTSASVVFVWDMRLSYEKRMYPIRMKVTATDHSELLYWDLTADLPKGWVISKAQFPRIAVVRPKDGKMITSAGWGNEFDMATGGAYKVTYPSCTGSMQLLLMHNGEGSFYYATEDRNACGKELRAVCGSKSVTFVTEVVTSEGWTDATTGRFDLPWTTVVGYNPDGWQAAALQWYRPFTFTCEWGNKSLQSRNIPQWLLDKDLWIRSKGVTDTVMAAINKTIDFFGEGIGVHTYYWHNYPYDTHYPDYFPAKPEFEGMISTIQKRKCHAVPYINGRLWDPAADSYTALNGASASCRKADGTLYTEIYPTSKVLNTVTCPASSLWHKIIIGLVDKIQNELHTNGVYIDQIAAAAPQPCFAKNHGHAAGGGDFWYKSYKALIDSIRGNHLRKDNIVFSEENSECYIPLFDMLLTVNTPHANCSIVPLFPTVYSDRVITCAYTYTPTADVTKGEFRYQNMQCFLYGSQLGWVDPTLLMRDEAKTEATFLRTLMELRKKQHDIFIEGRYIREFVPGGDNPQIDVPTFGKNHVVMGSEWQSKDGQRVWYVVNMDTQAHEVILPSGKSLKMKPLSGKRINLMKTINKIIIALAGIAFVACSDFLDTQSPSYDSGGIYESEAGLKEGVVGIYNLLYMEGTFTNSSHRPAVVTIDNFTGLSMERAQNTTIGAGSGCTPDNSSILAYWSGLYKLVARANAVIYGASGNIENMSDEAKRYYAEARVLRAYAYYNLVVAFGDVPFFTKPATTEDYNASRTSRQTVMDFVIEELGLIAEEMPWTATERGRVDRAVAYGLQARAALFAGSLNFGGKAMDYFRTAANAANRVIGQRDLAKSFADLFTKEGQTKSDVRNEMLWELMYSDQMVNNTNKYHWVALGNGPRMFAQTGQHPGSLLADTYECIDGLRIDESPLYDPKAPNKNRDPRFGATLKMHGDTIDYYTASGTNKFIVEAFANQTQMYNAALKRWMKTNNPDVNGTAAWTSFVSNGCGYLWYKYVGGLTEDYSTVTCNIAIMRYAEVLLTYAEAKIELGELDDTVYDAINKVRLRAGMPEVSSDRKGNIDKMRQLVRRERKVELAMEGLHFADMRRWQIGDLENAKPSYGAPLSTVTYAGMEATDIPNFKTSDRHDLNDIASYDAYSDKLHVRDQSRYWDDKFYLWPIPQSERNKDPNLTQNPGYNEMKASYSSKKGVARNLLFFLLLFFMLPSMAIAQSTVRGIVTDDNGEPLPGVAVVKDGTSLAVSTDIDGRFAIKASEGDVLKFSYVGMESKTVKVGKENELNVKLSSSLTELDEVVVVGYGTQKKVNLTGAVQSVSGQDLIRKSTSNLSTALQGIVPGLSAVQSSGQPGADNASIEIRGIGSLNSSTSPLVLIDGAEGDMNRIDMNTVESISILKDAASASIYGSRASNGVILITTKRGAEGKVKVNYNGYAGFSTPTYLPEPVSAIEYMTQMDKAYVNNGQDPVYKDIIEIYKTQGADNYNYYDTDWKDLVLKDSGFQQSHSVSVSGGTKLLNVFANAGYYYQNGIIPNNSFSRATLRLNTDMQVRKWLKVGVDAHIRQATAIRPSQDSAAGIIGSILTMTPITSALNDDGTYGYGRTGYNPLAIVNDGGTRKDVAPEVTFRAFAELTPLEGLYLKADYTRRQVNSEGAVFIRPYDTYEGGRFMMTYPSTSNNGTRQEERTKTVNQQFIAQASYEKTIERNYFKVMGVFQAEKLDYNYLLASRQNFQYDGYEDLMHGDATTAGNSSNRYELAQLSYVYRVNYSYDNRYLIELNGRYDGTSRFRPESRWGFFPSASAGWRISEESFFEPAKTVVDDMKLRVSYGTMGNQSIGSYYPYVAAVNSLSGTVNYWFDKKLTTGIAQAQLANELITWEKSKQFDVGLDLTLFKSRLSLTADYYIRNISGMLQQFDLPDFVGMSAPWQNAGSMRNNGWEVSIGWQDKIGDLSYYVKANLSDVKNTVTNLYGKEYDSSPTITREGEALGSYYGYVADGYFQSQEEIDMADCVYGGNKANIKPGYIRYVDVNHDGEINSKDRVILGNSTPRYEYSFTLGGQWKGIDLSLFFQGVGKRDLYYSGAGARPLVQNSTIFKSQLDTWSPENPDAEYPLLLVDAGSTNMNNIVSSFWIKSGAYLRLKNLTVGYTLPKKWTNRVSIDNLRLYFTASNLFTINSGYKGYDPETGVTSGAMYPVMKTFNFGINLDFMDFKVLAEQYRSELFDSVLPFWLKNSQDKEYGGYFSCLDRDGSVYDTDKFVWLQGREIWLFSMLYNKVEKRREWLDCAIQGAEFLKKYGHDGNYNWYFSLDRQGNPLVEPYNIFSYTFAVMAFGQLYIATGNEEYAEIAKKTFDIILSKADNPKGKWNKIHKGTRDLKNFALPMILCNLALEIEPLLSTECLSRTFENCIHEVMEIFLRPELGGLVVENVLENGELSDCFEGRHMNPGHSLEAMWFIMDLGKRLNRPELIMKAKDTALKMVNYGWDKEYGGLFYFMDMKGYPPQELEWDQKLWWVHIETLIAMLKGYQMTGDRGCWEWFEKIHDYTWSHFKDKEYPEWFGYLNRRGEVLLPLKGGKWKGCFHVPRGLYQCWQILESIMKKSSYNIGYILFLAVVAACGGFLFGYDTAVISGTIKQVTTLFGLNDIEQGWYVGCALVGSIAGVAVAGTMSDWIGRRLTMIFASIMFSVSAIGCALCGSYQWLVFYRIVGGIGIGIVSIVSPMYISEIAVTEYRGRLVSLYQLAITVGFLGAYLINYWLLSVSESMRFDSELMNWIFVDEVWRGMLGMETLPALLFFIILFIIPESPRWLLLRGKVARSESIFGKIYSRKERAKKQVEELQAHIANETKSEFKYLFQPGILTAVVAGLCIAILGQFMGVNAVLYYGPTIFENAGLSGGDSLFYQVLIGVVNMGTTVLALLIIDKIGRKKLVYYGVSGMIVSLLLIAFYFSFGESLGLSSILMLIFFLLYVFCTAVSISAVVWVLLSEMYPTKVRGIAMSIAGFTLWVGTYLVSQLTPWLLGTITPAGTFLLFAVMCVPYMLIMWRYIPETAGKSLEEIEKYWLSRKMHKTQYIFRYIMNNRRDFLKKVALAGTSAVIGSQIEALGSNGVSSSFSGTSEGGGLIVPKSNGLKITGTFLDEISHDIPHQNWGEKEWDRDFRYMKAIGIDTVILIRSGYKKFITYPSKYLLSKGCYMPSVDLVDMFLRLAEKYGMKFWFGLYDSGKFWETRDMTYEIEHNKYVIDEVWKNYGKYKSFGGWYISGEISRQTKGAIDAFRTMGKQCKDVSGGLPTFISPWIDGKKAVQASSGRLTKAESISVETHEREWNEIFDGIHDVVDACAFQDGHIDYDELDAFFSVNKKLADKYGMQCWTNAESFDRDMPIKFFPIKFDKLRLKLEAAKRAGYDKAITFEFSHFMSPQSAYLQAGHLYDRYREYFEIKMPHLLLKEFEKGSKNSLIKKRIITHYIQNGCSTITELSKELDLSVPTVTKFIDEMCGNGYLNVYGKLETNGGRHPNLYGLNPESGYFIGVDIKHSSLHIGVVNFRGDLIDKKLDVPFKNANTKESLDALAGIIQKFIKTLSINSEKILNININISGRVNPASGYSYSIFNFEERPLAEVLREKLGYNVTIENDTRAMTYGEYLQGNVHGEKNIIFVNVSWGLGIGIIVDGRIYTGKSGFAGEFGHVVSYDNEVLCHCGKKGCLETEASGSALIRKLMEREANGEISLLSSRIREKNALTLKDVIAATEKDDVMCIDLIEDIGNNLGKHIAGLINILNPELVIIGGALSLTGDYILQPIKTAVRKYSLNLVNRDTTIVISKLGDNAGLIGSCLISRSRMFEEMKKMRKFAWIFMAAMTVAGFSACSNSEDEDLPGTGGDGGEGGNPSTPSVVVKDTIYQFNNIEAEYTPINELCPGWTHEIISPSDDDRTWQSKIFTSKTDGSVDKYIQATAHDSSDKNAGLAYDWWMISPALNVKEADKKIFSFYSQGAYWQNSTKLEVYVMNEPKSTASSKVKLEVNLATEANANPVGSSPFGGWVASGNISLEGKGDIVYIGFHYTAEGGKGKSTTYCIDDFAFGRNQVAHFIEEGVEPEPTPEVDWTKAKTVAEALEIANGETFAVKGYVVGCIKNNPSKTSYKSFDEAKQAGDIEWAGAAEFTGYSQVFIADNAEETDGSKCLLVKLNDTDAAKSLRDAAKLEGHPERIGMTVYVNGLKKANYGLPGIREIDAFKVEEMRQLKYIGVVFAALMLFTACEKEFDAIPEDFATVPEGSDEAWPQTVTIKDLIENFDTKEGLFTIDTIDSPNDIIVRGRIITDDRAGNVYKYFVIQSLDDDHTCLKVSVDAGSLSGMLPLGQVVAIRCNGLVLGRYAAAPQLGVRGYRNDNKIREEPGRIPYTLAMKHIQKIGTPDPSKIVVEEKTLKEITEMDKYGYFKIVKIKDVYFTGYDSDGKKLNDEILPFPSDGKNVTAALAKYALNPTFAPATYDNNKKYNIGFPRSREIADDSGNTVDVYISTSEYARFADRRIPTPGSGNKGEITAIVGWFQDNEDYDGTWQLTVRSLDKPFADLKGFDFPQMNRKLWLLMTWLLVVPAFVQAASVRGVVVDYETNKPIANVKVAIRNVSAVTDFDGNFELEKVRAGSVVVVFTAADYKAYSVDFVVNDGVNTLNASLQPKKVGNTLNQQALEDNIFELDESAIDDEGSAASQSASYLSGAADDVYLQAASYSYSPMRFNVRGYEQRESSTYINGLNFNDLERGRFNYSSLGGLNNAMRNKDAVNGLEMPGYAYGSLGGTTNINTRATNYAAGTNVNAAYTNRAYKLRGQAIYSTGIMDNGWAFTGSVVYRWADEGRTEGTFYNSFGYFLAAEKVLGDHRFALTTFGAPTKRAQSAAVSQEVYDYRGIYYNPYWGYQDGEKRNSRIVHSYDPTAIFNWDWKIDDESKLSAGVGFHYSQYSNSAIAFYNAPDPRPDYYRNLPSWQYYQLAVDGPDDIYNAYYKEVNKGLANQIADLWRAGDPNVTQINWNAMYSANYTNNAINPNGSAKYILERRHNNLMEIPLNFLYTNQLNSELKLTAGIEAKYAKGMHYKTVDDLLGANQWIDIDQFAERDFTDNQDIIQNDLDDPNRAVYKGDKFGYNYNMHVINASAFIQNDWKLPLFDIYYAARLSYTSFQREGLMRNGRAEVIGARSKGFGKQMYFIDPSIKAGIVYKIDGHNRLSLNALAESRAPLAGYAYVAPRIKDTRIRGLKSEKVFSADLTYQLNTSIVKGRVTGFFTEFRDGVESTGYYHDEFRTYVNHTLSGVNKRHFGVEAGVSVKLNSSFTISAAGTYGSYKYTNDCMGTMSAENGMNLFTEQLPVIVDGRAASTDYTEKVYTEGLHVSNGPQLAASITLDYFHPKMWFADITLSYFDNNYLDFSPSRFTHMNMYGGKYPNEVGLEQNYNGYRIIGIDKNGQTSMVWSFDEKTGKPVLVRDYTGNKGSDIVKYYNQKAMIGSQEKLKGGFLLDASVGKLIYLNNRKQQLNINLSFNNILNNTSMITGGYQQGRVSRDNKSVTKDIQSVDKFPNKYYYAWGFNMFINVGFKFMKKIGFLLLAVFLTGVTVTQAQKKQYAIYAVAFYNLENLFDTINQPNTNDEEFTPSGSYRWGGLKYRNKLNNLAYAISNFATDNSSPFKLKNGPAVIGVSEIENEQVLEDLIHTGELSKRNYGIVHYDSPDFRGIDVGLIYDKDQFTLESSRSARLHTPQFPDLRTRDQLVVSGILAGERVHFIVNHWPSRLGGEKQSSPKREAAAALTKHLADSLLAADPDSKVIIMGDLNDDPSNRSCKTVLGAKKKQQEVQAGGYFNTMWEMFDKGIGTLAYNGSWNLFDQIIISGNLLGKDRSTLKYIRSEVFNRDFLKQKEGKYKGYPLRTHAAGVYLNGYSDHFPTLIYLAKEIKMIYIIFTNKLFHYLKEKVIVMRKITLFVLLFAVVGNIKAAHYEYVPLVRDGVEWGYSQQLFGKSYYRNLIQADTIVNDIAYKKFYTFKSCSETADENLAFIRESGKQVYITFNKLLMPVESLCDREYLIYDFGVKEGETITHFDWITQKSVSSTISKIDTVEIANTLRQRFWTGDKVLWIEGIGVEDGDLLRPGCSTDVSGLDTQDKLVYVKGPDGNIEYETSDAVNDPCYSGIEEVDRDDDIVIIRNGRNLEIAVNDTKFRMIELVDISGRMVWCEYLDGRGKIVLSTADYPRGIYVIVLSSNEDRITRRVIFMNLFLFNLFTEIAISTKNMKIDCNPTQSNKLISALICTIFAQDAKIGYIRQSQASLLLPSFALSLHRIFKRDCPMTQKAKTYMLPVAMATGSLAGYLLPDLTARWATLLAPILIFAMLLVTYCKISPNDLHIKPLHGWLLAVQIIGGLTIFGALYFWDPIIAEGTFICLFCPTATAAPVITGMLGGNVPTLISYSLISNMAVAILSPIIFSFMGIHADISFLDSFLTICSKVLPLLILPLGVAILLRQCLPKIHTVLNKRQSLSFYMWAVSLFLVVGKAVTFIIGQGREAIPLEIAIALLSLIVCIGQFYIGRKLGGRYGDKISGAQGLGQKNTVLAIWLALTYLSPITSIGPASYIIWQNSINSYQLYLKEKQTMKGSMIAVGVGILVALVATVVFFVVYNSSRKGWQQSLAVRESEAADLKVRNGVLEAQVKSCTARLAEVQAQLDFANREREKLNREKGDLQARNQMLSENMEVQKQEVQRIRQEMNNEFKVLANEILQEKSKSFSEMNHERLAEILNPLKERLEGFKKTVEETYNNEARERFSLKEQIKELVERSESIGAEAKQLTHALRGDSKIQGDWGEMILESILEKSGLEKDREYFIQETLRDEEGHTIQGSDGRKMRPDVIIRYPGGENHQMVIDSKVSLTAYVNYVNAEDADEARLALKQHLVSVRKHIDELAGKSYQDYVGKGDHVMMFIPNEAAYLAAMQADHALWQYAYEKKVLLLSPTNLIAALKLVADLWQRDKQTRNAIDIAEEGGKLYDKFAGFVEDMEKIGKSLNTTAMAYTDAMKKLKTGNGNLIGRVEKLKVMGVKAKKNLPAVNEEEEENMKYFSSYLCLIILSITMASCDKFFGEELTDLIFDHGKFEMPDKALFIGNSLLLGNGAFGMNATDSASDYHAVIQRKFLKANPAYTDTKLSGVDFEACENRAQQMDWLDNRLCPVLSDDLDLVVIQIGDNVNTSSKREAFEQGAKELIATIKAYAPRARIVWIYGWYVSNSVIKSVKNACKQYAVTLVAIDGINKAGNRSLIGTVITRVDPTSQSLNYTHYTVLSDNRLQIDFNVGGKKYKAIVQTESYSDNTEAKTLTWQGYETITTDKDIASHPGNNGFEQIAQRFFEVLNIDMKLGDVWFSAIAEAENSDRMIVVSGRTEIEPFIQSGKFKERVEITWKYEADSKGMPNETTGKLMEEVQTVLKQAMEKDKLAIFTGIYTGDGERTWVFYTRNIPAFGRMLNETLAPFETLPLTIYTEKDPEWNEYREMCELQDQDNDDEDLDEMKKALLHIGIFILFSAQIACSHGEDEPEDITTISVNEPGSLSEIIAPSQRGSITKLSVKGSLNYSDISYIHQMPELLYLDVGNVVLPNNYFPDNAISSHEKLEAVILPVSLDSIGASAFRWCERLQAVRLPKKLKSIGAYAFAGCINLYDIELPNSLLYLEKYAFSGCKSLYTLKIPSKLQRISDYTFSKCISLTEIKIPGSIREIGYKSFSGCSGLREISIPSTVKTVGIGAFENCTELKDISLPTTLTEINYYTFSGCTSLTTLTLHSKLTAINNYAFAGCKSLTEIHCKNSNPPLIGENTFRDVNRIGCKIFVPSKRAKKSYSTALYWNEFTIYIEMKNTLLRTVVIFVALCIYPSIHAYDFEYDGFYYDITSDSTVSVTYEGSTEYQYEGDIIIPEKATFNNKTYQVSEIGPFAFFECNIGTISIPNNIIAIRESAFTSSSLDSINIGSGVLIIEPSAFSYCNLGHINIPDNVTRIGHHAFYASFGLETVIIGNGVTQIEQSTFHFCPNLKHIALGNNTTSIGAEAFLSCDSLKYIELPNSISEIGKNAFSSCDALSSITLSENLSEIKEQTFSNCTSLSSIIIPDKVSTIATSAFSGCNHLVSLRLGTGVTDISYWAFKSAPLKEIYAFSETPPTVHYTNSYTNSFDADIFNQCTLYVPAGSLQAYKNAEVWKNFKNIVENDFTGIERPSPDKAKIFGNKNSIAFRNIEPGTDISIYDTTGKCIKTFAVDGDSEIPFPSGIYLIKYAGKTVKIILMGRAFEYRKARKLKRWGNMARTFTKIGKEISIAVKAGGPDPDANPRLRVLMQNAKAANMPKENVERAIKKASSKDAGDYKEVVYEGYGPFGIAIVVETATDNTTRTVANVRSYFNKAGGSLGTTGSLSFLFDHKCVFHIKPKEGVSVEDLELEMIDYGVDEVEADEEEIVLYGEFSENNNIQHHLEEAGYEIVSAEFERIPNDVKDVTPEQRASIEKLIERFEEDEDVQNVFHNMKEEEDEEMNISYNWLKDYVNFDLSPEELSAALTSIGLETGGIEEVQTIKGGLNGLVIGKVLTCEDHPNSDHLHITTVDLGESEPVQIVCGAANVAAGQYVVVATLGTVLYSGEESFTIKKSKIRGVESFGMICAEDEIGIGTSHDGIIVLPGEVKPGTLAKDYYNIKSDYVLEVDITPNRIDAASHYGVARDLAAYLTQRGKDAGLHRPSVNDFAIDRKEGGIDVDVANHEACIRYSGVTMRNVKVAESPDWLKQRLSAIGLRPINNVVDITNYILHATGQPLHCFDLNRIAGGKVIVKPAVEGEKFVTLDEVERTLTSNDLMICNEKESMCIAGVFGGLKSGVTNDTTDIFLESACFNPTWVRKTARRQGLNTDSSFRFERGVDPNDTLYALKRAALLVKELAGGEICGEVVDIYPNPVAPFPVTLTYEKIDTLIGKHIPVDTVKSILNSLEIKIVSETEKELSLQVPTYRVDVQRDVDVIEDLLRIYGYNHVEISDRVHSSLSYKTVTDQSHQFQNLVSEQLTGCGFNEIMNNSLTCGAYYDDLQGWPRAHCVALLNPLSNDLNVMRQTLLFGGLESISHNINRRRANLRFYECGNCYYFDPETHNEEKVLSGYSEEKHFALWQTGNRVEGSWAHADEKSSVYEMKAYVENIFARLGIAGDIIATQTSDEIYSVALTYSNRGGKILGKMGLVSHKILKRFDIDVEVSFAELNWDSLMKMAAKHAVLYSELPKFQAVKRDLALLVDQAVSFADIEKVARESERKLLKEVYLFDVYEGKNLPEGKKSYAVSFILQDENKTLNDKQIDAIMNKIIANLQQKLEAQLRMRQPSDKRPLRRFSEKDIKRFKVEHDDTLLNYLLTLFGDKSRTTVKSYLSHRQVAVNDMPVTQFDTMLHVGDELKINFKRGFSVFKHNRLKMVYEDEYIIVIDKGYGLLSMSTERIKTGTAYSILSDYVKSQNPENKLFIVHRLDRDTSGLMMFAKSKGIQEQLQHNWHNIVLERKYVAVVEGVMEQPEGMVRSYLTENAAFQVYSTDNPDEGQLAITRYKVLGGNSRFSLVELDLETGRKNQIRVHMHDLGHSIIGDRKYGAHGSPLGRVALHAVKLRFAHPVTRREMNFETPIPARFLSITSGTNRINTAEKMGDRIITLRNGTRVNMSTGEIISQGRPRYPHRPRRSFWRRVGDGFSRFFGFVWSVLAFILSAVVFIWKAMGYIILYGGLLSIIVTVISVWISDGFFSALIAGVVSFFVWGLVVGVADKLGMLPDMEPIVYIYQDHLQDFWNSGQSQCFGAAFEWKGEQVYHVYIKYPQVAPTGYSMPCLFRVVDTDDYGKAEDVALSVYASMPEEAKRVPVVIVCIHVEDTKVSSRAFIVDDGRIIEAVVKYVPRKSELYTRSKGLLEVGALESKKVLIVGLGSGGAPIAVELAKAGVGHFILMDFDRIELHNIARHICGVNELGRLKVNAVKDAILLKNPYAQVETYDIDMNKQLDILEKCVAESDLTIVATDEYASRYNINARLVKLGKVGLFGRAVTRAEGGDILRVRPGGPCYACLTGNPIYHQNDEITDVRRARELGVIPAYVSDEDAHAMVQVGLSTDIAPINNMMVKLALNELSRGIECGISSLIEELTYDYYIWANRRDFQFANWAPFNRNPNRHLTILRWYGVKLKKDSECLECRMGLFGKKQTDDCEDLGEALAQTNSGRREVELVIGDDGELEAMTPDEAEKSGKEKVGTTIGTKPYYNDKEMTYDRYQIELGVLQNSTIKSKQYKFMDMDTPYPYLAVAIQTNSLRCYVVKIDLSDNYPYNIPKVFITSPKPLLTRSGGSMLQASHSMHTLTGENGCVRVCHYGYEDWAPNRITLYQIIIKVRIWLEMYECHLKTGKTLDEFLKGANYMDIGRIAHGGVYIYRGELDFMARTILDSPHMETGGNLLGYWTPNGDAVIMYVLGPGRRSVCRFTSFIQDADYLQLHADRLFEEYHLSHIGVWHSHHGLGLSYPSGGDVQSIQEGMLADGLSRCILAIGICDRAGASVNAFSFVCTGEGVKMNLVPWNVVQGDGSVRSRYDTAYRDSVIMPQVKEAVYHELNMIPVQQMPPENGVTFDTGFWLNNKENRLQLKRIVSYIQSKYSAVKLLKVDDMTIEIRFDIPRRSSWRIVFDKDFPSRAPYVVRYEAGETTSWSLGALGKNGTPHWLSSFSEMGQSVINSLKYLSIMKMKIHREGKNILLILFIILALLNLPVYLWIKITWLAYLIHAASIIFFFLVVNFFRSPKRHFKGNPKNAIVAPADGVVVVLEEVLEDEYFHDKRMQVSIFMNIFNVHANWFPVAGKVIHVSHQQGRFMAAYLPKSSTDNERSTVVIKAENGEEILVRQIAGAVARRIVTYAEVGDTCDIDEHMGFIKFGSRVDLYLPLDCDIKVALHDKTIGDLTEIARLKMNAITKNIPNSITCLNLLSGCFACLFAYKGEYDIVALCIGLSALFDFLDGMAARLLHAYSPMGKELDSLADLISFGLAPGFMAMHFMLYDSVFHGINDSYQIWWALSALLIPVFSALRLAKFNIDTRQTTSFIGLPVPANALFWIGICQAGLQIEDKACGYAIVCLVILFSFLLISEIPMFSLKFKNLKLKENYLRYLILIAAAIFLIFFGLAGLAATIGLYIILSLLTAKKHMHALGLLLIIAFIIFIVPIIGIFQLILRFFFGKKNSVRNPFQQGQQGQNNKGRTTWYTHTKKNKKVIQDDEGEYIDFEDIKEKMKNINEMDSHVNQNESSNQVSGKVRRSFRRFIRVAIVLLLLVGGAFFYVRYYFVFGSGVKAGTLNYVVKKGYVFKTYEGILIMEGFRTESRGTLQSNQFVFSVDNANLADSLMRLSGRHVELKYNEYLGALPWRGYSNFIVEEILSVKMDNKITSLQPQAVWKYFNAICQVPRPSGHLDKITEYIMGVGRSLGLETILDKAGNVIIRKPATPGMENRKPVILQGHMDMVPQANKSVNHNFETDPILPRIDGEWVSATETTLGADNGIGISSILAILESKEIQHGPIEALFTNDEETGMYGAIGLEPGELQGEILLNTDSEQDGELYMSCAGGVDVNVEFKYKEEAYTPVAGEIALKLTLGGLHGGHSGVDIHLGRMNANKEMFRFLKEAVSEYGARLAHYNGGTLRNAIPREAEAVVTILSEDKTDFMAAVDEFFSTLRREYGFIEDGLVFKAEEISLPKTLLPEEIQDDLINAVVACHNGVYRMIPDAPEVVETSSNLSIVRTSEGLVEIQILVRSSSETMKMALASELESTFALAGARVEFDGAYPGWEPNFKSDILNLMKKIYPQVTGKEADVKMMHAGLECGIIGANYPGLDMISFGPTIKHPHSPNEKVKISTVETFWKLLVAVLENIPEKDMKRIIRDIVKYLLPLLCGVWLFWYVYQKLDMNTIFQILKSDVNYFWIILSMVIAAFSHIARAFRWRLQLRALNITPSMRVLINAIFGTYAMNLLFPRLGEVWRCGYVAQREKASFTKVLGSMVSDRLSDTIMLAMLTFAVFMIQMKPFRQFLNENPSIETGVMNVLTSVWLYVGIFVCIVAVVWFFYTNSRSKIVLKIKNFMANIWDGFASIITMRGKFWFVFYTLFIWFCYFMQLYVCIFAFPGMEDLTVSAVLLLYVLGSLGMLLPVQGGIGPWHFAVIAGLSYYGITGNEAGAFAFVAHGSQMVLIVLIGIYAFISMACDKKKPKGERIMAEVMTELPKSDRPMKGSFQLSVNKFFLTEIFHTSASYKVEDKPLSLQPTKVMSYIVRPKKSLGQHFLIDLNIAQAIADTLDNYKNTPILEVGPGMGVLTQYLLSKGHDLTVVELDHESIEYLQENFPELKGHILEEDFLKLDLSKLFFGNFCVIGNYPYNISSQIFFKVLEYKDHIPCCSGMIQKEVAERMAAPPGSKTYGILSVLLQAWYEIEYLFTVPEHVFNPPPKVKSAVIKMTRNQVRQLGCNEPLFKRIVKTAFNQRRKTMRNSLKSMVGQDCKILAEPIFNERPERLSVKQFIDLTNLLESYIIKMDKFTPEYIQNVQQIIKNDEKDKARELLKDLHPADIAELYQQLNLDEAEYIYMLLDGEKAADVLLELDEDDREKMLKQLPSEVIAKQFIDYMDSDDAVDLIREMDEDAQEEILSHIDDVEQAGDIVDLLKYDEDTAGGLMGTEMVVVNENWSMPECVKQMRIQAEELGQLYYVYVVDDDDRLKGVFPLKKMITNPSASKIKHVMRKDPVSVKTDTPINDVAMTFEKYDLVAVPVIDSIGRLVGQITVDDIMDEVREQSEREYQLASGLSQDVESNDTVFTQTAARLPWLLIGMVGGLANSVILGNFESNIAKNPATALFIPLIGGTGGNVGIQSSAIVVQGLANGKLDLKTAGKQLFKELGVALINACMISLLVFVYNWFFLDNIATTVSVSLSLFAVVIFASIFGTLVPLTLERFKIDPAIATGPFITITNDIIGMLIYMSISYALSIMKRYVLNISDLQDIAPQFKSESGTKILKYLFNLCKINEINALYDRSCDYRGAAFCNSIIDDLDITCQIDHEEKLDNLPEGAFITVSNHPFGALDGVILIKLLANRRPDYKVMVNWILNHVEAMSDNFIAVDPYSNPDRRKVSLNGIKEALLQAKNGHPLGFFPAGAVSKLRWDLRIEDREWQSSIIRLIQQLKKPVVPIFFHGHNSLFYTILRIFSWKMCAMRLPAEVFKKEHKTIRISVGDAISPETLAQYPTIKELEKFLKQETYKLKKRMKNNILFLICMLLCPLGKTFARVETPEWQSQYAIGLNKLAPHAYVWPYKEGDINSVRAQDYEQSPYYMSLNGTWKFNWVRNPDKRPVNFYRPDFYTGGWNDIQVPGNWECQNYGIPIYVNETYEFDDPMFHFKKNPPFVPYEDNEVGSYRRTFVLPESWIGRRIVLCFEGVTSFYYVWLNGELLGYNQDSKTPAEWDITNKVKQGENTLAVEVYRWSAGAYLECQDMWRLSGIERDVYLYSTPEEYIADYKVVSPLDKNLYKDGEFSLDVHIGGLKGRHGITVHYGLFDADHRMVAQDGGSPVRDSIVSFDAIIPDVKPWNAEQPYLYTLVVDLKDEQGQVIETTGCPVGFKTSEIKNGRFCINGVPVLVKGVNRHEFSEQGRTVSKELMLKDIQLMKQNNINTVRCAHYPNHSYWYQLCDRYGLYVIDEANIESHGMGYGPATLAKDTSWLSAHMDRTRRMYERTKNNPSVTIWSLGNEAGNGINFEKTYEWLKSVETNRPVQYERAEQNFNTDIYCRMYRSIDEIKAYLAQPDIYRPFILCEYAHAMGNSVGGLKDYWDVFESEPMAQGGCIWDWVDQSFREVDSDGRWYWSYGGDYGPEGVPSFGSFCCNGLVNAVREPHPHLFAVKKVYQYIKSRLIDNENLTVTVKNWYDFTDLKNYTLHWNVTADSGNILAQGEVITACAPHETVEIVLGKVKLPRDVKEAYLNLSWTPNQASAFMDTNYEVAYDQFVLLANSKYEAKIDLPSGTKLERDGYTWFNDKVSATVSPETGALISYKYRGEEWLSQPVELSLYRPLTENDKKDKHGGMLWKKAGLDKISQKVTSIKPSKNGFTVDVSVLNAKDNEIGTGSFVYTLDRKGMLKINTVFTPDTAIVKSLPRVGLTFRMPVANCCDVTYLGRGDFENYVDRVAGKIGIYETSPFAMFHYYVMPQSTGNRIDTRWLALTGEKGSGWKIISDKPFQFSVLPYSDINIEAATHINDLNFDGEVTVHVDAAQTGVGTATCGPGVLPVYWLPLESYEFDFTFIPVKEMKSIPLILPLMALPISGQAEKRGNVEMPQCPNVVFIYADDIGYGDLSCNGSKTINTPNVQRMATEGVRFTNAHSAAATSTPSRYAMLTGEYAWRREGTGIADGDAGMIIRPERYTLADMFRDAGYATGVVGKWHLGLGDEKGTQDWNQRLSPNPADIGFDYSYIMAATGDRVPCVFVENGAVVNLDPEDPIYVSYKQNFPGEPTGKKNPDLLVMHPSHGHNQSIVNGISRIGYMKGGKSALWKDDQIADELTNKAVSFIENHKDEPFFLYFATQDAHVPRVPNERFAGKSGMGPRGDVLLQFDWSVGEILSALKKNGLDKNTIIILSSDNGPVVDDGYKDQAVELLGEHKPGGPFRGGKYSSYEAGTRVPCILRWVDTVKPTVSDALVCQIDWFASFASLLGTDLPEGAAPDSENYLDTWLGKEAEGRPYLVEQNAQNNLSITSGEWKYIEPGKGEPFNKNVGIETGNSSLPQLYNLHKDLGERKNVAEQYPDVVEELAARLLEIKDGRVALPLKMVDMKIRKALVLGSFWFCASFCIGAPVANTFLPVVPVPAEYSVGEGYFYFNADMKFGVENESQLRMVSDFVTLLGRQTGFIPSIMIGSETADVRLKTVTSLPDEAYNLIVTSEKILIESAGDAGFFYALQSLRQLLPAGVVEGKKQNRTMEYKIPVMTVNDRPRFGYRGLMIDVSRYFMPKHNLLKIIDAASFLKINKIHLHLVDDNGWRLEIKKYPRLTQVGAWRVKRDEPFPNRRNQEEGEPVSVGGYYTQDDMREIIRFAALRQIEIIPEIEMPAHTNSSLAAYPELACPVVDRFIGVLPGIGGKNSEIVYCAGNDSVFSFLEDVIDEVSELFPSKYIHLGGDEASKVNWAKCPKCRARMEAEHIEHTEELQSYFMTRMSNYVRSKGKEVMGWDELTNSTLPEGAIIYGWQGFGKAALKAAAQGHRFIMTPARILYFIRYQGPQWFEPLTYFGNNTLKDVYTYEPVQEEWNPIYEDLLMGVQASMWTEFCNSPDDVEYQLFPRLLALSDIAWAKKGTKDWPDFLKRIDKVLPHIEAMDITCARSMYNIDHKVTPKGKKLMVELSCIRPDVEIRYTEDGTEPIASSSLYASPLTVKSTTCIKAATFMNGEKMGETLLLDLQWNKATGKEVLASNEKRYVLTNGIRGSLRHTDFEWAGWYDEDASFVLDMGKRTPVKEVRIGCITNSGMAVHKPSLIRLSVSNNKKTFVPVGEITFSQEDIFKNRTAVEDAVFSGLDLNARYLKLEMENPGLCPIGDIREDQKIWMYFDELIVNMTRFFRAFIILQSVLWNTFVHDSMCRKLYSCAILCHIKLYNIIPLLMKSISPNFFYTAASFAVLGGLVSCQSRQKPLNIVYIMTDDHTSQMMSCYDTRYIETPNLDRIAKDGVRFTNSFVSNSLSGPSRACMLTGKFSHKNGFTDNTTCKFDGTQQTMPKLLQQAGYQTAIVGKWHLETLPTGFDFWEILPGQGDYYNPDFITQTNDTVNKRGYVTNIITDESLDWLQNKRDRSKPFCLFIHHKAIHRNWMADTCDLNLYEDKEFTYPENFFDTYDGRLAAASQEMSIAKDMDLIYDLKMQRSDKETPLKSLYEQFYGRMDSAQKAVWDKFYTPIIDKFYKDDLKGEDLVRWKYQRYMRDYAKTVKSLDDNVGKVLDYLEKEGLLDNTLVVYTSDQGFYMGEHGWFDKRFMYEESMRTPLIMRLPEGFDKRGYIPQLVQNIDYAPTFLELAGVSVPSDIQGVSLLPLLKGESPADWRTSLYYHFYEYPAEHAVKRHYGVRTDRYKLIHFYNDIDVWELYDLQNDPMEMHNIFGQEGTEQVTADLMKELKRLQVQYDDPVLKEFPIGEMKSLKYIIVLGIVTGVTFSSCEDWLDENPKYSVDNTVIFDSEETAKQALDACYGYLTTQDCFGQGVYEMSVGSSGLSWSQTNGSEPDRYASLNATTAGDAVLWAWRGLYKAIQECNTFIVNMNKGSLSEDLKENYTAQASFIRGLCYYYLSMMWGDVPLRIEPSAHDAISEPKSSFIDVVGQIFIDWKYAYDNLPENGEHVDGYIDKLGVAAYLAKLNWMLSCNPDLADRKADYLEDAKFWCDLVYGKYSLQSRYSDLFVNHVQNSPESIFQLNFTTSSDYSWNRLNWIFAADNASPGTAYQRIRSTKAFHDLFRGTYPGDPRYDATFLTRWYDVKNGSSYHLISDSVYTYPYKTYKTKSTSRVADAVAYIPYDQMDDPTNPTVEELTVLQEQFYTENTTTGEKNVVNLVGQFATSVGDHAGWPLWKKQIDFNCQAQQSNNNIILYRYADFLLLMADVYNELDETDRAANLVNEVLRRARTSVSPEASQPVDFPSGLSKDQMRKKIFYERLFELAAEPEMYFDIRRGGTETLKMALEIVNRHDITYEHCEGEAQHNNPDQRFRDRYFGEDATFYGKVSDESFLKKNLHLPIPHSELSANDGLSAADQNFGYMKIKDMIRQALSVVIVMLSGMQIAYAQSITVQGNVRDDVEPLMGVTVQAKGTTKAVATDLDGNYTISVPDKNAVLVFSYVGYQKQEVKVGDKTVVNVVLQGDAQLLDEVVVVGYGSVKKSDVTGAIASIRPDEMDASKSVTLDNLLQGKVAGLVVGATNTTPGAATSITIRGASSLRGDNQPLYVIDNIPQASTGEFAASAFGDDDYQTAADPLSSLNPADIESIEILKDASATAIYGSRGANGVILITTKKGKSGKPRINVNANFTVANATRLYDMLNLSDYADYRNAQSGPDDRQFFKSGNEVRYIFSGGKYDETDPTSYRILQERDWQREIYRTAFSQNYSVSVNGGSDKVRYFVSASFKDINGIVKQTGLQQGDLRANLSMDLSKTVSVDLSLSGSLKKNDMMSGSNANGGAQGSVSVTAITSQPFEYPADDPSLSGTNGMEKRITVFSWLNDYDDQTTENAFRASMDLKWKIWKGLTYNLRAGGNLRDEYRARWFGTETFRGNNDKGSLGITDLSQNNITVENMLNYHHTFDRILDLDVTGAVTYDDYNYLNKRTQGRQFSNMSFGIDGLHMAERISYLEPVQRDYQLLSYLGRVNMSFLEGRYLATASFRADGSSRFARGHRWAYFPSFSLAWRMEQEDFIKDNVHWLDQFKVRVGYGQTGNSAIDPYSSFSNYSQIIDYANAVGDKVLAMAVDKLQNEGLTWETTESWNVGVDFGVLKNRLRGSFDFYNKETRDLLISRVLPPSAGFPSIYYNSGNLLNRGIEFSLEADIIQTKDFTWTFGGNIGKNNPKINSLGVSRGNFGVYENILAYEGNSLGNHFGNAHLFWVGHEPGLFLGYQTDGIVQEEDLPANGGSYNVTQDLSTGGAPQAGDIKIIDQNGDGVINTDDRVIIGNPNPDFTYGFQTRFTWRGLSLSAQFNGVHGKDMINTNIRYQAIPNRTGGNLRTEAWVGAWTAENRSNAYPRVNYTLPTPAVLDRYVEDASFLRCTDITLSYNLPKAVMKKIGFNSINIFGSVKNAFIITDYSGYDPEVNSFAFDGLRPGVDMSSFPHARSFIFGLNVSFMKTRILLLILFSSFFYGSLFSQTTNFALRFNGDGKVDCGTISDLNNLDLYSVQCLVNPSEWVENAYVFKRGNGDEECSLRFGTSGQLIYKTATQEFIVANDLPIGSWTQLTISAFANGIDVWTNGEKKWIANTGGAVIPETSEPFVIGENFKGRIDEFRFWKTEMPGAEPENLMFRNTVNKFHPKYDDLLFYYKFDQDQCEDIVDYKLAHHGEPTNVTREAVIDNDYFKYRVVTGYSSFVRHCDRLQIDRDMHLMTNDLIFLDAQVSGYTGAVTMTYPDNQGVLSNASYVAEYEGRNGVLHLNGEGAGMNVSEEVLQNTGGLPAMNYATIEAWISIEEWRTGAAIFNKSDESNQFSIKLGDESKKELLVGINGYTYNFENALTAAGWEHIAVSIVSTTGRAISRIRLFTDSGASQTYADDITTIPDEDDFTFMNTSADAVIGENFKGYIDEVAVWGNARTSAQIAQDAAGTSGDLTFPSGGDGAIYLLSYWQFNDADSPGKNTRSWKELLSQIRKMYDGYRGFKIRLGLISSDSENGNKVWPSHISDAAWRERLAADVAELLPYCDGIDVDFEWLYSGDSRWTSGYGPMVEALRAVIPEDKVFSVSLHPVAYFLPTKWIDMPDYYTFQIYGPQVTWFAYDNYVSAYNKFVSWGFPKEKIGMSYPTTATTGSNVTGYKNIVAANPDLSTDANTATMSGSSYTFNGVDCVKDKMNFILEQNSGTVMYFDMGNDVAVSDPLSLIRAANSVISANVDTLIIRTDGVSSLPVLSKEGKKKTNLICNDRSGEIVVLSTSDADLSQIAFFSASGVLFRDERISGKQYTISTDRFSPGVYIARVRSSEGVDVFKFRIKMKTKALLISTLCLLGANYSWAADEDVTPGHLKFADQTVGSYEFVHYSSQGANPVSPYPTEKLKEEGTVVLTGGQVKNEDASVAGFNKGCHIVASDYGNMLLIKGDGSAEEPTLSAADALAGYINVSMFTQIDFPVNTPVRFHFVSKVVGDPITADYKISVWNFGGATTNVPLPETTTYSSIDTKWWPIYADLNIAGITGDDRIPLRIRYNIPGGHLGNRAIYIATIQFTANPSGECPEFDPVNFDGWDTPNGSPATGIDAIGETNGFVAWDSQYIYLNDIDFGTEVFIYSLNGALVKTVKVTDSFVEVPMSRGAYVVKYGNKASKVVLMRRRLLYIYLLLIAGIIACETVIVEAAPNFYFKQLSQQDGLSQNFVRSIMLDHDGFLWVGTKSGISRFDYHEFKNYSSVPDSAASLPGNLVHFIVEDARHNIWISTDKGVCVYQRESDDFKTVLWRQKALQAHSYLLTDDALFLGGRGVIYRWDYHRAVMDTVPVRWKDKSYAFFNHMIPWSEHCWVLSSRWNGLWLLDCRTGEIERPTFCKEKEIMSVKVDTQGDLWISPYGKGLDRYIDGGRKQKHYDVSNSDLTNNVILDIEERDGSLWLATDGGGISILNLKDETFSNIRYTPGNIYSFPYSSVFCLYKDRDDNMWAGTIRGGLFGIKEVHMRTYRDVSPGNHYGMSDKTALCLYEDEDGIIWVGTDGGGLNRLEPKSNRFTHYPNTYGYKVASITRYNERELLMYFFSKGLYLFDKRTGNLRPFTLLNDRRNEEIIHSGISVNVDYFDTDKIHLFADKIYTYDKSTGSFTIAHVADSSRYYGTVQRFYSDKDITYLFGRNYILRLDHAKNAAVCLFAFGSKAVINAACRDDEGNFWIGTDKGLFHYDVNTQALNEIKTNMFREVTSVAYANQYLWLGADGLLFRYSIGEDKFFIYGESDGAIPNEYLHKSTLVTRDGAHIYMGGVTGLLHIDREIYKEYNSLSPSSVELSDVVLDGKSVMNKMGDTDRSLRVAWNYTSLTLKTMVREKDIFRKKMFRFNIEGLGRSEIETYDHTLTLYTLPAGTYRVMASCSTEDGGWSQSRCILQIEVVPPWWKSFWFIALVVIVAAGLCYLMISYTVKRKNSRLQLEMKERERKVYEDKVRFLINVSHELRTPLTLIYAPLKRLLKSGTVDDTLKTQLMQIFKQARRMRNIINMVLDMRRMEVGYEALHLAPYSLNEWVRAVIGDFSEEFESKKIMLLFNPDETIDKISFDREKCEIVLSNLLMNAFKFSEEGTVVTVITERRESCVRISVKDHGIGLNENDLSHLFTRFYQGDHRLSGSGIGLSYSKTLLVLHGGEIGAYNNEDKGATFWFELPLAYNDEDVACAPGMYLNDIGYATDMPETTVPEKDFPLQDYSILIIDDEMDIRSFIKTSFSSVFKQIYTADDGVNGLHVVHQCQPDLVICDIMMPHMDGFEFCRLLKSDIQISHIPVILLTARDNPDSLAAGYKLGADFYLAKPFDDDVLLTVIRNLLWNREQIKNYYRDAVQVSIMPKNQTFSNADEQFLLKLNKLVLDNIDNSDLDVKYLTVEMGMSRASLYNKVKALTGLGVNDLINRIRIEQAMRLLTDTDIPIAEVSERIGFSNARYFSTCFKQFTSMTPREYREQKRNEPSAMIPAEIQQTKQRFGIIGNAPGLIRAITRALQIAPIDLAVLITGESGAGKEFFPQIIHANSSRKHGKYIAVNCGAIPEGTIDSELFGHEKGAFTGALSARKGYFEEADGGTIFLDEVGELPLTTQARLLRVLESGEFLKVGSSTVLKTNVRIVAATNLDMVKAVSEGKFREDLYYRLSTIHIEIPPLRERSEDILLLFRKFSTDFAERYRMPVIQLTEDARTVLLNYRWPGNVRQLKNITEQISIFETNRDVDGATLQNYLPQYNIEKLPARATSNEQEHSFFEKERKMLYKTLFEMQKELADLHTKVEELTREKIQGQTPYAQTPQPVPVAQSMALTPIVPSVPVHVPSAKRTAIEDTVGEIIPNEPEYIEEQPTTLEDTEKETIKKALLRNHGKRKKTAEELKISERTLYRKIKEYNLEMKRLTTILLVILSSCSISYKFNGASINYETTKTISVANFPIKAALVYPPLEELFTNSLKNAYTRQTRLQMVSSGGDLQLEGEITNYDLTPQAVTENAYASQTRLTISVRVRFTNTKDPQYDIDQTFSGYKDFSSDRMLTDVQDELIQQITDELVDQIFNATVANWMITREQIRNLLNGIGDETISKSDADQMAADYPYFSIPQLLYLKFTPGAMPDEKRIQQALIYASPHAHLETILGVEGESFADLYPKAPRTDSTMQAIDLFLGTYRKEQKRGNEEESLDRIISGNILAQSDYISNLQKEEQANLATTPVHEHETNPSPAVLPKTTGRDQENTEQSASSESSNDDTFFTESLAKIYIKQRRYEKALQIIKKLSLKYPEKNIYFADQIRFLEKLIINIKTEMSVVLTVFIILASLLMIGIVLVQKSKGGGLASNFASSNQIMGVRKTTDFVEKATWTLAIVIMVLSIATVFVSHNGQQSSVSEIKDIVNTEAPAALPGFETPATGNNATPTQEAPVQEAPANMDDTKPFWHLFRHNRNDEKPSEIETEAKLKEQIQALVRNGIFFDFEKRKAAPVQSKFGGKPALPKKFEWPHYTDEYGEHIVLPFFLQLSCEELSVYDTDNLLPHEGMFYLFYDLTNQPWRNSKGAKLLYTPTPISELVPTDFPDNLPEEHRLPEMALKFTAHTCAPDWEDYVGMTGDDNTAYTDWDIIERKLGKWGYPHMESAGRILGYASLIQNGIAEACESRAQEEKQQTYSKKSAREWILLLQLNCIEEEEVDIPFGDCGSLYFYIRQRDLERRDFSQIQFELQCYMEEQQETAGKRVPVSSEKLKALQAAMDKIEKSYGRGAIMKLGDDSVEEVAVIPTGSIALNAALGVGGYPRGRVIEIYGPESSGKTTLAIHAIAEAQKAGGIAAIIDAEHAFDRFYAEKLGVDVENLWISQPDSGEQALEIADQLIRSSAVDIVVIDSVAALTPKAELEGDMGDSKMGLQARLMSQALRKLTATISKTNTTCIFINQLRDKIGVMFGNPETTTGGNALKFYASVRLDIRRVSQLKDGDEVIGNQTRVKVVKNKVAPPFRKAEFDIMFGEGISRAGEIIDLGVDKGIIKKSGSWFSYGDTKLGQGRDAAKKCIEDNPELADELEAAIMEALKPVKMALKRGDKAPEILGVDQTGKEIRLSDFAGSKLILYFYPKDNTPGCTAEACSLRDHYAELQASGYAVIGVSKDGEASHRKFIEKQSLPFSLIADTECKLNEAFGVWREKKMAGRTYMGTVRTTFIIDENGVITDIIEKVDTKNHASQILKNKMINSQFNKSSITIWSIKYSPISKILLYLHVMIKNIAYDYIKNPIHTLMKNLFLILFLILGIGITYAGKNYKVTVTYEIIYEYYDDSNGSYMGEKPAGTSSNKFSFYAETPHEAEEKAISQCSSTCSSSGTYQGPGEYKGKKCKVYQKRRVISARAQMKVKNFRSNSTMTFLFIVTTTLLFSSCASFISTMESTDWKKTTNDNIELLNDAMQTGSNKDKMKTLFVLLDKEIRQFFRNAFLPKLVIVFPVMVILIIPWVTTMDVRHIGVSVVDNDHSETSRRIIQKIEASDYFNLRGVTESYDDSFALLEGGEADVILTIPNDFELSLIGDSPKRIGIDVNGINAMKGGLGSQYMVQLVMQTFGELQQEKSVVVSPDLFTVQNRYNPTLDYKHFMIPALMIMLLVMICGFLPALNLVSEKEIGTIEQINVTPVSRLSFTLAKLIPYWIIGFLVLTVAMVLAWLVYGLSPEGSPGSIYLAALLFVFTMSGMGVTIANNSSTMQQTMFVMFFFVMIFILMSGLFTPIESMPTWAQWITYILPPRYFVEVMRSVYLKGTMFIELWPNYVALAVFAVLFNSMAALTYKKQAMGGFLSFVKKEALHILRDKRTMLIVLLLPIVQILLFGFAISTEMNNIDFAVVAPNRTETIRQQIERMEANPYFTFKGYISQAEIDDVLRKGDVTAVVVFSEDYDRLVTNAGIEGVSEAAVQFILDASNPNNAGTGLGYLQSSFQSGISVASVAPATRVLYNPQIKSSYNFVPGIMGLIFILICAMMTSVSIVREKETGTMEVLLVSPVRPIWIIFAKMIPYFLLSCVNLVVILVLARYVLGVPMSGSMVGLVGLSLLYLVLSLALGLFISTMANTQVTAMLISGMVLMLPIIMLSGMLFPVENMPGILQALSCIVPARWYIDAVRKLMIGGMPFAEVWQQACILFAMTAVLVGVALKKFNDKLEMNDIIISVRDLCKCFGDFVAVDHITFDVKRGEIFGFLGANGAGKTTAMRMLCGLSYPTSGRGMVAGYDVMTQGEEIKKHIGYMSQKFSLYDDLTVRENIRLYAGIYGLSRYQMLRRTVEMLNRLHFRSEIDTLVGSLPLGWKQKLAFSIATLHRPEVVFLDEPTGGVDPVTRRQFWEMIYEAASGGTTVFVTTHYMDEAEYCSRVSIMVDGKVKALGSPAELKKQYAVGSMDEVFRILARSAKRGEMAVRNVIEIRGLTKRYGSLTAIENITFEVRRGELFGLIGPDGAGKTTLFRLLATLLNPDDGVATVDGFDIVGQYKEIRKRVGYMPGRFSLYPDLSVEENLEFFAALFGVGVKDNYDLIAPIYTQIEPFRKRRAGKLSGGMKQKLALCCALIHRPSVLFLDEPTTGVDAVSRSEFWDMLSELKSKGISILVSTPYMDEACRCDRIALCNNGKILGIDTPAGITERFDEPLYALSGDNMYGLLVEARRIKGVKECYPFGESHHLVADSMFDSDEFVTHLNGQGFHHVSIRPVEPGIEDVFIKLMQHEMKRIAVYSAMTVVLAACGNGGDFDATGTFEATEVLVSAEAAGRILSFDVEEGDTLSAGKQVGAIDTVQLYLQKLQLERQRASVHSNRPDISKQAAALRGQIAQQETERRRVENLLKDGAATTKQLDDINASLRVLNGQLDALLSTLKNNTSSIDENASAIDLQIAQVEDRLSKCRIVSPIDGSVLVKYSEAGELAATGKPLMKVADMDRLYLRAYFTSDQLSDLSVGQEVTVVADFGGDKQREYPGRITWIASESEFTPKSIQTRDTRANLVYAVKIAVENDGLLKIGLYGEVRLHQMKRVVILCVWLFSVVAGHAQLSLDECRRLARENYPEIRQYDLVHQTEQYNLSNAARAWIPQLAFSAQATWQTDAPNFPKELTGMLAQQGLEIPGLRKDQYKVALELNQTIWDGGKSVADKRIARAEAAEQKTMTDVDLYELEGRVDDLYFGILLLDERIAQTNLTLNLLRSNLEKVRALQRNGVAMQSDADVLEAELLSVGQQLIQFESSCDSYRRMLGIFIGQKVGDRKLQHPSAVQPLSGESARPELAMFAAKIDRLTAQEKMVKSSSMPRLGFFAQGYYGYPGLDYMQSMMNNDWSWNAMLGVKLSWNFGAYYTQKNNLNKLRTSRQQVEVQRDVFLFNMNLQAAQENGDIARLRKAIADDDRIVALRRSVREAAESKLRNGIIDTHDLLSKITDESTASMARSMREIELLKAIYEYKHTINRMKKKDTESEILKAAEQEFMLKGFDGAKTTSIAHAAGVTHAMLHYYFRTKEQLFERILTEKVQLMSESVLAAFGQPGLPLLERLKDGVTCHFDFIAANPQLPRFIVNEVFSRPERYKLMSDKIVKVADCLMKGIQQELDELHAQGKVEWVDVRMLLLDIISLNVFPFIAYPIIEPILGDIAADRNRFFELRKAENIEMIMRRIKKMGKVLIIGAGGVGTVVAHKIAQNPDVFTEIVLASRTQSKCDAIADAIGGNRIVTDRVDADKVEDLVALFKKHKPDIVVNVALPYQDLTIMDACLHCGVNYLDTANYEPLDEAKYEYKWQWAYRERFEQAGLTAILGCGFDPGVSGVYTAYAAKHYFKEMQYLDIVDCNAGNHGMAFATNFNPEINIREVTQKGKYYENGKWIETEPHEIHRPLTYPNIGPKESYLIYHEELESLVKNYPTIKRARFWMTFGQEYLTHLRVIQNIGMARIDPIMYNGVEIVPIQFLKAVLPNPGDLGKNYTGETSIGCRIRGIGKDGKELTYYVYNNCSHHAAYLETGAQGVSYTTGVPAMIGAMMFLTGKWKKPGVYNVEEFDPDPFMEQLNKQGLPWHEVFNGDIELMECKIKVGITQGDINGVGYEVILKTLSDPHIVELCTPVVYGSAKVAAYHRKALDIPAVNFNIISDASAADENKVNLITCVDDDVKVEIGKATAIGGEAAYAALERAAADMEAGSIDVLLTAPINKHAIQSDKFDFPGHTEYLERRLGNGQKALMILLNDTLRVALVSGHVPVSKVSSVVTKETILEKLQIFEQSLRQDFCVVKPRIAVLALNPHAGDDGLLGTEEIEIIKPAIQEANAKGMLCFGPYPADGFFGTGHYRQFDGVLAMYHDQGLAPFKAIAMEDGVNYTAGLPVVRTSPDHGTAYDIAGQNRADEQSFRHALYLAIDVFRNRSFYKEITASPLRKQYFDKSGDKEVLDLTSDTDKGEMEKEHLLGKTLEELQTVAEENGLPRFAAKQIASWLYEKRIDHIAGMSNLSLKHRELLSQRYDIGREAPVQSLRSTDGTIKYLFRVGGDDFVETVYIPDRDRSTLCVSSQVGCKMNCSFCMTGKQGFKRSLSSAEIINQILSVEYSDKLTNLVFMGMGEPFDNLDEVMRALSVLTSEWGFAWSPKRITVSTIGHLNGIRRFLDESRCHLAVSLHSPFPEERLRIMPVEKAFPMTDVLDLLRRRDFSHQRRLSFEYILFNGYNDSLDHADALARLLKGMDCRVNLIRFHAIPGVTLKSTDMQSMEAFRDRLNNRGVVATIRASRGEDIFAACGMLSTAEKNKKMATLNKIRSKAGLLVVIIGVALLAFIVGDFLNSGHTFYAMNQNKVAVVNGTNIGVEEFQERVKVRTDELQQMYGQRGMTLPEGYVSRINQEVYDQMVNEILLSEELEELGIVVSKEELADLLSGDNISPQVRQYFTNPQTGEFDRQGLLNFMQVVLDPESHGYNTPELLAQIEPQRQMWLRLEQEVKQNRAVQKFANLLNRAIMPNKLDLENSFEDNKTSANIAYALQPYTSIADSTIAVSDSELKAEYNKMKSFYKTPERRSIKYITVNIVPSEADYAKAKEKAEMNESVFATTDDVVAFIANNSDESYDDSFVAISSMPEKMKKFAQTASVNESSPMEFENDTYTMYRLMDTKVAPDSIKVRLLSFQPRSTEIDSVLNVLNHGGSFAELAPKYNGNDEIWLMENMASSVGRPFINKVFSENGNGYFKAESLGGEHIVQILSRTAPVKKAKVAAYVLAVNPSTETHTALYNQLSSYSAANNNAEKFNTGAKEAGYTVNSYECSAEDYSLPGINDARQAIRWAFNTDKGEVSEIFTLDNSFVVAALDNITKEGYAPLEQVKDILAMQIRNDKKAEKIIGDLKSKNLNSLAGYAEAMKAQVDSAKFVSFSSPSIAGVGYEPVLSGLAPVSENGKLVGPVKGSRGVYVFTVTDKTVSEQPFDAQTETQKIQQNYGYLINSRLMEVLRDKAEIENTMIRFFMNWILIIIIALLFSAFFSGMEIAFVSSNKVRVELDMKQQGMMSKILGLFYGNEEQFISTMLVGNNIALVIYGMGMAALLEPVIALVWNQEAFVVLMQTLLSTLLILFVGEFLPKTIFRVNPNATMRFFSPFVWLLYVVLYPISKFTSVVSKCVMRLGGVKIAHQPYGALMSKIELDSFIQKSIEESDSGEPVEPEMKIFQNALDFSNIHLRDCMIPRTELVAVDIDEVTVEELLQTFISTGISKVVVYRENIDNILGYIHASEMFRRHEDWKKSIRPAVFAPESMLANKLMRTLMQQKKSLAIVVDEFGGTAGLVTLEDLVEEIFGDIEDEHDTQNLVARKVSDDEFEFSGRMEIERINEEFGLDIPESDDYLTIAGYILYHYQTLPRLGETVEIGNYRFTILQRKATKIELVRMKIEKMAKKENTDRWFICISRLWVVAFVAFPLLWSACSGPKNEVVKGFEDAAEVPTLRTLDVMTLISDSGVTRYRINAPEWLMYENAQEPYWYFPRGLHVEKFDSVFATEALIQGDTAIYFKNKQLWRLDRNVRIENTKEEVFLTSQIFWDQRKREIYSDSFIHIETPDEVIEGYGFTSNEQMTRYKIRRTSGIFPIKRDSVPPDSAKVDSVAVPKQAIKPMKNSDNNKPGITLLPCRAPQPYETLQNSIGKKTTFQSSPPVWHSHIGGVPVGGMKYRLLLLVAVLFSWIGGNYAAVVPESTAVETANMLLSQRGGVMFKGGKAQVETVFQGNEPMYYIIRFEKGGWALISAEDTVDPLLGYSFDSEYVSEGQPEWIKGWLKEYTDQIKIARQTPALQRHYRWAGDLVSRATEDRIDPLITVAWNQDSPYNSLCPQMSGGPGGRAYVGCVAVAMGQALTVVRYPLRGQGTKSYTSTNAGFLSVNFDNEPDYDWDAILSGANNYSEVARLLYHCGVLIDMEYGADGSGAITQNIPGYFRHYYGFPETCTTYSRDIDYAGKDNEWHELIQSELKRGRAVIYAGNEGNQVGHCFNLDGWDGFTSYHVNWGWGGVNNGFYTLDNLGDHVQGSYPDNHRVVVGVAPKSETPYDIRLSTTRVKIGTPAGVAVADVTVLSDMPDAEYEFELKGMMQFGGTYAEPSYEVRDGKLYTTKLIEDKAVHKTVYIKAIHKESRNSYEKKFDLQLSTSGIDEVLAEDVKIYPVPATDVLTIEVPYAEGKYAIYNVAGMALQSGEIDDNVTTVDVSNLSKGSYMLQYSTSQGVVVKSFIVKMFAEQIHSRIVLNNLSRKKEYFVIAFYIKKPPTLMSEMIDIEHFTKIFYSLGEIDRSIVKKYIHGDSIRNISRCLGYSESFIYERIYKFHKKIRKVSRHEKAQDFDMKKYIIGLFSAICLMGAGCTEFEDFTPVDMGEGPAVTVTAEKTAVDAFKVTITPAEGTVYYSYIVTDEAMTVDPDQLLQAKYEGSTLVKAAEKPSVSGTLSNQNLGATYYVYAVASNDKGVCGAVASASVELPDEEAPYLVNVPDGNKYKATNGGRSVVLTFNETVVRGSGAITYDVTKGNLTSYASGTIESVAINNESVTITLPESVVFDENEAVSYVFLDFAEGAFADAGGNVSAALVGGVDEETQTVAAPYWEYTAAQESDFTGTFGFLFYQYDLQTQQPGSTPMGFDTEFSLKHANNPDTLVIDHFYFKDGYPNQLEAEVTDNGFRIADLQIMGVMQVETNVGMVNAIFTFAGLPESETDNFEYVNFAENAQGDEVVYAQDRWCGLYCFNADVDPSDSNFSLGWYDLWNASLFFKGSVQAAAANTNIPSSIKLLKNEMKLSEMRPLSATEKLHMQSLIRQNLKMKSIRMKISKFIYAAVVGGVLASCQSVDTPMFSDKDAFVAFDSKSTSIAENAGSEVKIPVSLVASKGLDVSVGFEIDTTAYAGKNAAKEGVNYRLKNTSNTLSFTADGEMVAYILIEPIDNDDYNGDVCFDIKLSAPEGCNLGANYTTTVTISDDDHPLAAAGILGKYNASGANPFEGGMQNWTCEVVKDADYVDRVWFTQIVPAANGATYKSVMGTVSADFRSITINAGQDLGTAGEYTLSLDFNGASSATAQVSNGTISINTYVFAAIVEQTGYAASGAQTVTMKKVEEMKKIILSIAVLALALSSCEDFLTKEPPMDQSDELALSTFEGIDGATAGNYRAVISWYGASFPLTFDVMCGNGMVGPVNTGRMRMEPAWNYTSTSTMGLWSSAYSAILGCNKALTAINEGKFSRDGVSDEQINNIKAENLFLRALAYFDLVRVYAQPYGYIKANGITGVEAMGVPIVLKDDLSARPSRNTVAEVYENLIIPDLVEAERLMSDSYVRAGVKDVVATVTKPVIQALMARVYLHHEDWQLAADYATKVIKNGRFRLLSGDRFVSMWDGSVDVAPQSGSEIIFEVYVSQSDGSRSDLGDYLTAPEVAGGAGYGDVRVSNDLIDLYDATDVRLTGLTKTNSKYPGYRWSTKFPGKNGLLAYNNVPVLRISEMYLIRSEAIYRGATVSGVTAIDDLNRVATNRNAEAYASVTLDNLFEESRKEFLFEGHIFFDMKRLQKSLVRTDYDLDPLTKNIDFPSYRWALPIPENDILYNDNMDQNPGYQSKMRKLTLLLCALLAGISLAVAQTSISGTVLSAENDEPVIGASILVKGANASTITDTDGKFTIKIPAGASRTLVISYIGMEKQEVFARNGMVVKLNSADHTLDDVVVVGYQTIRKEAKTGSIATVDGDDLASIPETSVDKMLSGKMAGVSVSSSNGQPGSVATIRVRGTSSIGAGNNPLYVVDGIPVESGDVGGLSNSMNAIALINPSDIASVTVLKDAAAASIYGSRAANGVILITTKSGESGKSKITARARYGVSTLANDNDFGMANLEEYVQYQRDARINAGYNPDDPSSEYYFPQAMAGRRATNWMKELTRNGSLQEYELIASGGAGKTTYYTSLSYNKTNGIVPTVGFEKMQIRANLDTELNKWLKMGTRLHGGYMKVSDVQNSLLGDSGLAPTNPFYSGMALAPTMNAYNEDGSYNFDLPFVFNVNPIAAIREQDKYDKQYKFNGTVYLEWKPIKQLTFRTNNSIEYATTTSRAYSPAFVNTASYGASLNTAESQYRILTTSNTITYDDLFNDDHSLNVLIGQEANTYESSFLQGISYHVNQQRPYHSVGVSVEDQRVGDGLTEMAMVSFFGVAEYNYKGRYYVKGSIRTDGSSKFGPDRRWGTFWAASASWNIHNEDFMQDIKSVLNQLKLRYSYGVNGNDNIAAYAHYGLYSDIVYNGITGQLPSQLQNRKLTWETNKTHNIGIDFRLFDRLNGSIDWYTRRTEDMLIASPLPYTTGFASQAQNVGKIRNSGVEVQLDAEIFNTNDFKWTAGVNFAANRSKVLELAPGQDFIGTTLRYVKGEQLYTYWLYDYAGVNPQNGNALWRNEEGLLTENYGEARRINAGSPEPLWTGGFNTELSWRGISLGIQLEARYGNKVLNQDRSLFEADGSYGDSNIWKGAMNYWKKPGDTNVLPKPVYNNSSNSSAISTRYLEDGSYLRIKDITLAYSLPSKWTKKALMSGVRIYASALNLYTFHNMNYWDPEHGTSGATIISYPMTRSMIVGVDITFMLKSTSHRSIQHAKITKKPQYKNQIERKHTFRAFFLIKPILFFRRFINIHFSQQDMTPPLYFAEQNTGEEGEMPRNATGHGRGGGGEVSNVNMKRSFNRKEKEVQRKELRSNGTKYEATLWLILKNRQIDGVRFRRQFSVGEYILDFYCPELKLGIELDGQGHYTIEGSLRDGSRDNSLSARGITVLRIENRAIFENQPAVIELLKETVRRLKASGQSVMSGASSADPDGDRSDKPKSPITAAAFLCSFFSLLRRTNKESELVMNGSFFSQIYTNGAILSIFFYFSTPFLYACVFGMGLFFSAREAGMNLIIDQGNSITKMALFRAGRLQNVYFYPKWDSTTVIDFLNVHEVDAAIFSTVTEYDPEAIAILRQRLPYFLKFDHSSELPIKIGYATPETLGLDRIAAVVGAAMQCPDKAVLIVDAGTCVTYDLLTADGTFAGGNIAPGIRLRLRAMHEHTGKLPLIDDAGETPEIGFSTETAMRAGAVLGVAYEIEGYIARLNKVYPDLFVFLTGGDALKLAAKIKSRIFVDENLVLTGLNRILQENAKIMLKYKILFICLSIGLVAFAQNGTSSPYSRFGYGILGDNAIGAQRAMGGVGYALHNNRQINVMNPASYASMDSLTFLFDIGLTYQNTITREGSLKENSQSGSLDYIVMQFPLGRYMAGSVGLLPYSNVGYSFINSIDNGSDSRSGDGNISQAYVGVSGRPFKGFSIGANISYLFGNLTNTNTVVPESGSSGIFETMLKVRDYHLSFGAQYAIEWNKKHTITLGAVYSPGKTLLGRAYTSTYDVSSNTTIDADTLKMKNNYSLASTYGGGISYNYDKRLTIAADVTYQNWADAKFTNLTAGQLQSSKGQFNNRLKIALGAEFRPKNMGGNYFEHVNYRAGIFYNRSYLKINGNDMDEIGATCGFGFPLATDKSVVNVSFEYINRQCTPVKLITEDHFRISVSLTFNEMWFWQRKFEMKRLLFAGLLGVITSLGLRAGEPTTMWPYLFDDFMEASIYSKSGNKGEAKVNIHLLRNDLHYLNGSQIYCPDNQNDIGRVVFADSTEFVRCENFFIEVLGETPQAILGRRTTGDFDRLLQGTGAYGTSSSTSAVDNLSSLQLGGIANLNYDMIRVERENGQTLPVSTRLCFIVGGEIVNANKKSVSKLLPESSRKEFNVFLKANKIKWSKVDHLQKVLGYISPLLGKMKIKHLLCFIALCLFFTPGKAQQLSVMTLRNGATVYIWEDKSKPDVFGMIAFKVGSVDDPEQYTGLAHYLEHVMFKGTQTIDALDWEKEKPIYEKIIAKYDERAALSDPAAREAVDKEINDLTREAAQYAAGNEFSLLVDHMGGQGLNASTGYDQTEYHNSFPPSQLEKWLEIYSERLIDPVFRGFQTELEAVYEEYNMYNDDRGSRMREFIYEQAFGDHPYARPIIGLPEHLKNPQLSKLIDFYNTWYGPQNMSIILVGNIDAKEAIPMIRDKFERVPRRAEIHREKKPVRQFKGRTEKSAKIFYYPMLALIYNGVPSNDKDEIALDICCELLSNSQKTGILDKLQLDGDIMSVGASQNAMRDAGILMINAIPSFDANQNRWDSHKSVEKIVLSSLRQLQNGEFDEATLEAIKQNMIREYDLQMESNEMKAYILASLFNTGADPSDIVNFKEKVKAVTIDEVKAVAKKYFNDNYLALNIQEAKNLDSKGQKLKKPDYKPIETKKGAKSEYAKWVESIPVNMPEVKYCDFNSIQQKQLNTRSKLFYNLNPENDVFTMTLKYGIGTKKMPKLEYAVALMNNAGMLPDIEPLAFKRAMGELNANCTYAVDDNYMYVMMSGYEKDLVKACQLLSKQILFPKLDDKQLQSLIGSAFGSRQMEKSSIGTLESALTSYVLYKDSSDYLQRIPTRDLIDLSITDLTTQFQAATNYECEIYYVGTAPFDDVYQVLSQNLPLKAQEMPSTSPELRPRQQYTENTIFFLPNSKATQSKIYFFIEGKPFDVKDDIFIEAFSSYFGAGFGSLVVDEIREKRAMAYTSYGIVGTPSVAGRNTLFQGFVGTQGDKTLDAIEIYMNLLKDMPSTPERFDVVKTNIKESILSAKPGFRSASAVYEAWKRMGYTQDPAIDKMKKIETLKFEDIIDFYNENIKGKPVVIAIVGNPKDFDTKALEKYGKVVKVSESKLFSDSFMNIMKKSMTGAFLALAAVSTGNIEPMEACTRAVYIGPEQMVITGRTMDWKEDIMSNIYVFPRGMKRAGYNKGETVNWTSKYGSVIATGYDIGTCDGINEKGLVASLLFLPESVYSLPGDTRPVMGISIWTQYVLDNFATVHEAVEELKKEIFRIDAPRMPNNGPESTLHLAITDETGNTAILEYLDGKLNIHEGKEYRVMTNSPRYEEQLAINRYWEEIGGLVMLPGTNRASDRFVRASFYIKAIPQTSDAKIAVPSVLSVMRNVSVPLGINTPDKPHISSTRWRSISDQKNKVYYFESTLTPNLFWLDLKKIDFSPSAKVKKLPLSNGEIYAGDAIKDLRDSKPFDFLFQTPVMMKHSIINCTNTLRQTSEIYGTNQTLNTTLHLSEEKFFVLLPENLMKLDKNKVFSFIRNRISVGKLFLAIFIIFIIFIDENSCIQRIKYDAEINDLRKQIAAQNDTTEYYNRRIEELKTDKNIIEQVAREQYLMSKPNEDIYLIENKKMNQQTRNILFMVSSIAVIIGAAMPLFMLKMPWVPYIYAFGAAGMAVCRLTFRYKGKNFRLKRLYHIETFSSLFLVASSYFMFKEDPDWIMLLTVAAVLQLYTSILIPRVSKKEEKMTVILYLILVLCGWISIYAASYDFDNASIFDFAERSGKQLIWIGLSLVLAFMILMVDFRVYETYAYLFYGIIILLLIATIFLAPDIKGSRSWLVLGPVSLQPAEFAKFATALALARSFGTYGFSLKNRRDLFRAVFIILLPIVLIIAQKETGSALVFASLIFVLYREGLSGLFLFYGLCAVVYFVVAVKYSSVLWGEIPAGEVLVFVLILLVVVGMLLFYQRNSRAARYLMLGYLAVGAVCGILMYFDVPVNLLYVCMGTTAAVVVYLVLLYFSTRSLRILTILATAVVSVIFLFSVDYAFNEVLESHQQKRIKVTLGMEEDLRGAGYNVNQSKIAIGSGGFLGKGFLNGTQTKLKYVPEQDTDFIFCTIGEEEGFWGAVGVIVLFVTLIFRLIAIGERQHSAFGRVYAYCVVSILFFHLAVNIGMVIGLCPVIGIPLPFFSYGGSSLWGFTILLFVLLRIDASRAERHMRKDYKLERRKYVIGGIVLVIACIYVVRLFSLQVLNDDYKQHADGNAFLKKTQYPSRGLIYDRNGKLLVFNQPAYDVMMIVREVRPFDTLDFCRTVGITKEQFDKRMADMKNRRLNPGYSSYTPQTFMTQLSAQDYGRLQEKLYRFPGFFIQNRMLREYAYPVAANVLGNIREVSPGDIEKDSYYTRGDYTGDLGIERSYENILRGEKGVEILLRDAHGRVKGRYEDGRYDVAPVSGKNLNLSLDIELQAYGEKLMQNKIGAIVAIEPSTGEILAMVSSPTYDPSMLVGRERGRNYLKLNRDRYKPLFDRALMAAYPPGSTFKPTQGLIFLNEGIITEHTLYPCYHGFVSGRLKVGCHGHASPLSLLPALQTSCNAFFCYGLRSMVDNRKKYQSPAKAFNVWKDYLVSMGYGYRLGVDLPGESRGFIPNSNYYNKVYGENRWSALTIISVAIGQGEVLATPLQIANLSATIANRGYFYTPHLVREIQDTVISPEFTTPKYTMVDSHYYDYVVEGMRMAVTGGTCRIGAIPGIEVCGKTGTAQNPHGKDHSAFMGFAPMDNPKIAIAVYVENAGFGATYGVPIGSLMMEMYLNRKIAPERKYLEERMLQSNTIIYSGVKKHMNSWLRYFFLFIVVVFLQVTIGNNIHLLGVAIPFLYIYFIIRLPLSLSVNWTLTLAFILGLVIDIFSNTPGMNALACTVVAFLRKPILNLYTPRGEDYSESEPSIRNFGMSLFVRYVLTFSLCFCTLLFVIESFSFFDIGRLIVRILASTILTFLVILGMDSLTKSGREKRLMRNLINFLLRHSSWIVLAIYVAISCVLLVGRNPYQRSIYLSSANQVASAVYDLQSEVTSYFGLREVNRDLQLRNGELEMEVINLKEQLNRYRSSVGKDTIPFDSVLHDYDFAVARVVNNSVAQINNYITIDKGRAEGIEPEMGVVDQNGVVGIINVVGEHHSVAISVLNPKLRLSCKVKGSDYFGSLVWDAVSPRYAVLEEMPRHVEFAPGDTIVTSGYSSVFPEGIMVGIISDYKKQRDDNFYTLRVELSSDFSGLGYVRIISNRQKEEQDKLEKEARYEMGLFSFTQEIAIDLGTANTVIIHNDKIVVDEPSVVALDKRTDKLLAVGEKARLMHGKTHENIRTIRPLRDGVIADFYAAEQMIRGMVKMVSSKSHWFSPSLRMVIGIPSGSTEVEIRAVRDSSEHAGGRDVYMIYEPMAAAIGIGLDVQAPEGNMIVDIGGGTTEIAVISLGGIVSNNSIRVAGDDLTNDIQEYMGRQHNVKVGERTAELIKINVGSALTELDNPPEDYVVHGPNRMTALPMEVPISYQEIAHCIEKSISKIEAAVLNALEHTPPELYADIVRNGIWLAGGGALLRGLDKRLTDKIGIPFHIAEDPLHAVAKGTGVALKNIDQFSFLIRMRCFMLENKKIKTALVSVFHKDGLDEILKLLHAEGVNFISTGGTQSFIESLGIPCGSVENLTGYPSILGGRVKTLHPKVFGGILNRRENEVDQQQITQYEIPSIDLVIVDLYPFEETVASGADESAIIEKIDIGGISLIRAAAKNYKDVVIVASKAQYAPLLAMLKEKGASSSLEDRRWFAKEAFAVSSGYDSAIFNYFDGDEASAFRYAGNHAKTLRYGENPHQKGVFYGNFEEMFDQLHGKEISYNNLLDIDAAVSLISEFDDTTFAILKHNNACGLASRETLVEAWKAALAGDPVSAFGGVLITNRPIDKETAEEMHKIFFEVCIAPGYTADALEVLEQKKNRIILVQKPFKASNRQFRSLLNGVLVQDRDLYREKPEELKQVTEKAVTPAEVEDLLFANKIVKHSKSNAIVLAKNRQLCASGIGQTSRVDALRQAIEKARSFDFDLQGAVMASDAFFPFADCVEIAHEAGVTAVIQPGGSVRDNDSVEYCDKNGMAMVMTGIRHFKHMEKIGIFYGSTTGITESVAYRLAELMHVKKEDIHDVARSKPSEIGQYELLLLGSSTWGSGDLQDDWYDFLDGIETLDLKDKTIALFGCGDQSMSDTFCNAVGTIYHRLQKTGATFYGAFEAGDYTFDKSTAFINGKFIGLLIDDVNEPEKTENRLNHWVELLQSEYIVTQMQLYSEKRSIMNKLIGLLTCLCFSTNLAVAQNKDASSIIKFGLFADTQYADCPSQNTRYYREALQKLDTCIEYFNRQEVQFTINLGDITDRKNSDLEVIKQHLSQLNHKIYHLTGNHDYKDITNNSVLYKQLSMPSEYYSFKKGDWVFIMLNTNEIASYANIAGTPKENEWNRMQEQIKQIKGKYAYEWNGGISEKQMQWLDRLLKKCEKKGLSVLIFSHHPLYPQSDFSALNGNEIVDTLSKYSCIKAAFSGHHHAGAFGYYKNIPLITLEGMVETENQNAYAIVEISQDHLLVKGQGRASSYSFKLSRQMVISPENILLVGAILLFLSVLVGKTGAKFGVPALLLFLGVGMLAGSDGFGIYFDSPQIAQFIGTVALCIILFSGGMDTHYREIKPILAPGVTLATLGVLMTTIITGLFIYSLSDLLPGNFQLGLLESMLLAAVMSSTDSASVFSILRSKGISLKERLRPTLELESGSNDPMAYMLTILLIQVIEIGVIDWPHSIVLLFMQLSIGAAAGFALGYAIVWIINRINVPNESLYPVLLFSCVFFVFAFTNLLQGNGYLAVYIAGLVVGNRKLVHKRSLTTFFDGFTWLFQIVMFLTLGLLVNPSELPAVAGVGLLVAIFMIVVSRPISVFTCLLPFRRFTTRARVYISWVGLRGAVPIIFATYPLMSAEIPNARMIFNIVFFVTIVSLLVQGTTVSAMARWLGLVGKSEEKEIFNVALPDEIKSAMSEIELTDEALSGGNKLMNLSLPDNTLVVMVKRREQYFVPKGHTHLQSGDRLLVISDNDEELRKSYESLGISRYTMRKNRMYIYLVFEILEAVLNLFRDRLRPMLKQIGVRDMQSIAGYMIKSDIGLVGLAVMGENLALNLEQKGYRVSLYNRLRENSPQAVDSFLANKGKNKHFIGTHSPKEFIESLKSPRKILLMIRAGHPVDEMITTLLPFLKKGDTIIDGGNSDYRDTQRRENELREKGIFFVGCGISGGEEGALHGPSIMPGGSDEIKKEILPVLQNIAVHLDDGTPCCSWIGPDGSGHFVKTVHNGIEYGDMQLIAEAYSLLNILQKGDHEATAQTFESWNKGVLDSYLIGITAPILRYKDTDGKSLIDKIADRAGQKGTGKWSIEAAIDSGTTLSVTAESVFARLLSNRTTERNKAHRLYPETDPAPIFELSVDDIHHALYASKIIAYTQGFDLLYNMSEKHNWQLNLADIATIWRKGCIIQSRFLYEIAQAYKLTNEYENLLFTPYFREKIILCLPFWRKVVQTAIAAGIAIPGTASALAWFDGFRCKKSSANLIQAQRDYFGAHLYERIDAPAGTFFHTDWNRHGDGTTSGNYSLMNKIPESQILIIFGASGDLTHRKLIPSLFELFERKLLPDKFLIVGVSRTKQSTEEFRQSLHSSIIGNGKTYATDNPYLKNFLREIYYISCDTTDCNAYVALFREIEQLRNAAGIEDNMLFYLATPPQMYATIPICIQAQQQNISKNGWRRIIIEKPYGSNEDEAKQLDKLLCGIFPEREIYRIDHFLGKETVQNILVLRFANSIWEPLWNRNYIDHIEITATETLGVEQRGNYYDSAGALRDMVQSHLMQIMAFIAMEPPSSFETEAIRNEISKVFRSLRPLSPDDIAHNTLRAQYSEGKLNGTKLPGYREEPNVNKQSTTETFVALKLYIDNWRWAHVPFYIYTGKRLSEKRSEIIIHFRSTPQALFPGQCCGDSCNQLIITLQPDESIRLRFGLKQPGTNFEVQQVSMDFFYNSLIPNKLPDAYERLLLDAMRGDALLYSRSDALELSWHYLAPLIDHWEKEKEENLVFYPAGSPIPREITHIYSHPYVLEAPVCTPNPMNQTIVQFYPDATKSLIALTNALLISAAARTKKPFYLALSGGETARSLFEIWKNQYNDPKRWKNVHFFWVDERCVSSENEESNYHWAEKLFFKPVGINPNHIYRIQGEDIPYREAERYSRLVAEMLPDSNGVPQFDCTLLGIGEDEHIASIFNNDTDLLKSDDLYAVSRHPATGQRRITQTGEVILASREILIALVGERKKELLHRLVARKDQTITPATYILSHTSRATIFTEIELNSKELSFQMRIDIITVLPELLQSPLNYSILKRAQDKKLVEIVVHNLRDYSLDKHRRVDDYPFGGEAGMVMQIEPVDRAITQLKSERNYDEVIFTTPDGERFDQPMANRLSMAGNLIILCGHYKGIDYRIREHFVTKEVTIGDYVLTGGELAAAIMCDAIVRLIPGAIGDEQSALSDSFQDNLLAPPVYTRPAEYKGWRVPDVLLSGHQRKIDEWKHEQSLERTRRLRPDLLEMHTIGKILKTIREERGLQLRQVAIESNIDLTLLSRVENGKRMPSESLLIKLAETYGLDSNLLVLQLVSDKILEISEQYPDHTIEALKVAQEKARLGERYISFFMNSFISRPIGLESRRYIGNKTKLTDWIMETIRRECPEAHSFCDIFAGTGAVAGKAIPYYDQVIFNDLLCANRVIYQGFFEKGEWNRDKLCTILDEYNHTDYNSLEDNYFSINFGGKYFDYGVSKLIGYVRQNIEDRRGELTDKEYNILLSTLIYNMDRIANTVGHFDAYIQGKEIEKKSLTLRLIDARSYDNVAIYQENSNTLARTLHADIVYMDPPYNSRQYCDAYHLYENLVRWEKPEVKGVAGKFNQKDKKSDFCTMKAVDAFADLVDNLHTRYIVLSYNNMAKKGNGRSNAKMDDTDIMRILEAKGRVQVFSHDHRPFTTGKSNIKNHQERLFICVCDNHMCMRQSLDFPNRIQSPLNYTGGKFRLLPQILPLFPANIDVLVDLFCGGGNVGINTSAERIVLNDSDKNVIRIFRLFRQYPTEQILEIIDGIIDRYGLSDSRTNGYAFYQCESARGLGTYNKEGYNRLRSELNNMKRRNDRYFFMLFTLIVFAFNNQIRFNEKREFNLPVGKRDFNNNMRNKVRHFAEAIKNPHIELSSNDFRRIPFDGLSEHSLIYADPPYLITCATYNENNGWNARLEKQLLTYLDRANDRGIKFALSNVLKNGDKENTILAEWLERNPMYIRHDLNYNYSNSSYHKKDRSKHSTEVLITNFEMGTTSFRTADFNQKIERQLTLLSKFWEVHTDVVWSGNDEIQSLYYDFMKDNDFLTGDAPNKPKDAREKTSGLIDLGLIDNERRPTAAGESLRQITSNGDFRPNNLLQIPADSYIYFKQMLKTSNDVDGEIVRPFVVLVLALKQLEYLTQEEFTYLLPLITTSRKFRTIVDCIKRLRKGDITIDEIIVDTLLTMENYREARLYLLERPVSEHVICQAGINRKSRQYDSTYYPLYRTIESLDRNNAQSILDLLQACRNIRIGALWCNHLFKTTNRGKIKKLLSASLNDVPILNCRNESELKDRFFRLMHLFKVKANLSDYFDLNRRYFGTTDTVLFKDNRVELSPIPKCFFDLCAENLEEIAFTTSPLLPLDCDIEKIIPRYDIEESDLHRKLADKYGLAPQSLSDIRAFLDDERHERFNRLIDARFPDHVLLELLSDFETRNDINIRRLVTDNADVPTIFEYIVGIVWYKVSNRKGRILDYFNLSLDADLLPKTHAAGGMEDITYRYNATPGYPEHTLLIEATLAEAGTQRRMEMEPVSRHLGDFLLRDNRQEAYALFVTPFLHLNVISDFRGRKQMPYYSSDGEQCINGMKIIPLNTAELKNIIANSMTYDQLYPLFECAHQNNEPPKTWYENNIMRSLQPKKTSTGILGTLFMRVKAFIFVVLILLGGKIFTVDATEKHTIDIVGIELISPYRCNLTIGFKSWGDPFYSLDIRSPDLLYITNENINPKDYEDKSYITYTITSLFTDTDYEFVITSYGEFAAKSEILTFNSHDFLSKIQVNNNEIPRSGIVYYEPNRKYQFECITDFPAENFQWSFEIAQKEGGPKIIATGESPQFPIEIPTVEYMDKRNDDGDVICNIYCKTQYGGITYEINYPFFIRTYPDQPKIDILDVKVQDAQSCTLTVGFHAWDAKTYTIKIVDTNRDKIWEDNLEDNINNSYTTYTFDKIYIDTNYEITVWGFNGSKILMTQTLYFRMNDHMGIEKIEQDEFIESGTIFNLQGQIIGRFTENHRDIFTELQPGIYIINGLTSTGKKVNRKIIVKSPSSPIMITVNNLGIQFGKRVLFQEVNLKFTPGNCYGIIGANGAGKSTLMRILSNQLEPSHGTVTLGPGERLSVLSQDHFAFDEFTVINTVLMGHTVLWDIMQEKDALYAKPDFSDADGIRAAELEEKFAELEGWNAESDAASLLSGLGIKENKHYMLMKDLSGKEKVRVLLAKALFGHPDNLLLDEPTNDLDLETVMWLENYLANFENTVLVVSHDRHFLDSVCTHTVDIDFGKVQLFAGNYSFWYESSQLALRQQQQQNKKAEEKRKELLEFIQRFSANVAKSKQTTSRKKMLEKLNIEEIQPSSRRYPGIIFTPSREPGNKILEVKGLAKSIEGTLLFKDVNFSIEKDDKVAFISHDPRAMTALFEIINGEAKADAGTYEWGQTITTAYLPLDNSSFFNTDMNLIDWLAQFSEDTSELYLKGFLGRMLFSGEELLKQASVLSGGEKMRCMIARMMLKNANTMILDSPTNHLDLESIQAFNNTLQGFKGNVLLSSHDHEFIQTVCNRIIELTPGGIIDKMMDYDDYITDEKVQAARERLYNLMIKHIVTFKLTGTPAERKEVANKFKDALMALPLTIDVLKSIEVGINENPSESWDIVLTAVVEKMEDVETYAKHPAHVAAAALLAGHKADRACVDYTYMKEQMTVEMLRYQIAKYRVMGNGAMCQELTALLQKKLAAAVAMPVKIPSSLPAVEILKAENIFVMDDLRASTQDIRPLKLLILNLMPLKIVTETDLLRLISNTPLQIELDFMSVSGHISRNTPLEHIDTFYKDFDEIRSQNYDGMIITGAPVEKLQFEEVDYWNELVEIFDWAHKHVTSTLYICWAALAGLYHFYGIPKYPLDKKLFGVFAHHKYDERNPIFRGFDDLFYVPHSRYSEVRRADIEKDKSLTILSESEDAGVYMVMARCGREFFITGHSEYSALTLDIEYRRDLAKGLDIALPRNYYPDNNPDNNPIVNWRGHANLLFTNWLNYFVYQQTPYNLNDIQMKTVRRIELLAPAKNVEIGQQAILHGADAVYIGAPRFGARSTAGNSIADLTRLIDFAHRFDARVYITLNTILRDDELRDAERLIHELYKIESDALIVQDMGITRLDIPPIALHASTQADNRTPEKVKFLEQCGFSQVVLARELSLGQINEIARSVQVPLEVFVHGALCVSYSGQCYLSEAMCGRSANRGECAQYCRLPYTLIDGKGNVIAKDKHLLSLRDLNQSDRLEELLDAGVSSFKIEGRLKDMAYVKNCTAYYRQELDKIFKRRPEYRTASTGHSSIEFTPQLEKSFNRGFTHYFLDGRTPEPIASPDTPKSLGEYVGKVKQSDKNTFTIAGLTSIHNGDGLCFANNKGEFEGVRVNRVEGNRIFPASRIEITPHTVLYRNFDFEFDKRLSRPSADRRIDVEITLYTVPGGYALYMKDECGNHTTIREDAPHETARTPQQETQKKQLGKLGTTAYSALKIDIDLPDNFFIPASVLSKLRQKAVESLDRIRRIAYRTEKRQEEDKTVCYPQTELSYLGNVSNRLAEQFYREHGVTRIDPAFEIKPSKGVPLMFTRHCIRHMLGICKKTPAGSKFPDPLTLLYKGQKLQLHFDCTACEMTLYKKDILMTKFNTYLESNDFDRLKRFFEEHGELQHYRKGNFFARQGEYSSQAALIKDGTFAYTHIDNEGKEHYVGFVFPDEFVADYTSFMRHSASQVNIVALKPSTIFSVNRQALHDFYNTDMETLRYNCLMAENLYEMVYSRLLESYCKTPEERYRRLTTRYPKIEQEIPLCKIASFLNVTPETISHIRNKIVKNSMKKRTLLFLSILATISFTSTAENLRESIAIVRPNFSESTQTFLTDFSKSLRKDGFYAAADILQNYGKGSFGTGFAYRDKRDGRLYIITNRHVVEQAETVDVEFSLPGNSSKTFATCPVVGVHDDFDVAFIALPEEVNIPTLDITDKSITDGTPVFSAGFPALGDKPSWQLGQGIVSNASAQIKSLTNGKELPLVQHTAQVDAGSSGGPLLIRDENAAAGFAVVGINTWKASDRENTNFAIPVHAIDDFLKNYSTDPQSLLTRTEVTNRASAMLKAAQSSYQAVMPFVSYRYVSNISANTFYDLVNAASDAATDAMKSCFEQGQPLEGIRIGLSDIICRQFSGRNYTFSTVAALDSIGRTAEAIYTTGNKNISTRWIMEQGRWRLSAAENIKASRIEPNGISKSYGFGTSIYIGLVYPFNNDAFDMSYNIAFKRTILTFMTYEVTASLLKVKTEKTEWEGANEIVKPHSHNVFDLDLNIGGQLPVKCGPIYLVPYAKILGGLYFGSDLTGIDYGFGTGVEIAYKFGYQNYVFANIGYIGKRMKPFDDEEFRLKSKTLSGLAFSIGISFMKKILWLCPLMLLMMAFIGCDDKEKDDDESLGGQLSETTWAAEVKKYPFLTNFPEYDGELENHRYDDTYGILQYIIMDYKCEESLKTKYCAKLTAAGFVDEDGYGIYKKTTTEYKLAAIISYGGGTLALSLSAEPIQMRGEERKRAGRNRTLSVTGEEVEQLRDLVSTLSDIERGENVLNKIIHADLLAIIDRIPNGFADLAIIDPPYNLTKDFHGMKFEAMDNGAYIGYLETWFYKVCEKLKPDGSLYLCGDWKSTSALQTVLERAGLSILNRITWQREKGRGARNNWKNGMEDIWFAVKDRKNYYFDVEAVKMRRRVIAPYRENGQPKDWECTEQGNFRSTYPSNFWDDISIPFWSMPENTDHPTQKPEKLYAKLILASSEVGDVVFDPFMGSGTAAVVAKKLNRNFCGIELNEEYCLWAAKRLLLADGNKTIQGYRDGVFWERNSGAMGMHSSEVKEDTHDSFRRITAEVICAGENELRVRVAAPSLFGEMPVWIHRDRVNSEFDETLCLLEPGSKLNLVDVIIVDGGLLPRFLILEPDYLVDASALAECVQEYGTCWQRYFWNRIRPKTITDSILLGNAVNLIFDELITSKDFRSVTFDSLMPKIFARYPIEFVSAKSVDRRFFQNLHSQFETLKRILSTDFSALGIDRRKAMVEPSFICEALGLQGRLDFLQVENGLCGIELKAGRPPYPENDLSKVSFPHRAQCALYQSMIQSVLSVKLENQHFYLLYSRNLNPEGCLRPVKTSTRELQKLLNLRNKIVSVERDISRYGYVQAEWLVSRLTADNLIPRPSLFTERYIRPEIDCGRRRLERRDDNDLALRYFYRFYAFVSREHYLSKIGYPSGSGISGVASLWRMTRDEKEREGYMFSGLRLVRNCAAEDIPEVEFILPGNTPSPDFRLGDIVLFYVCDTDADRVSTRQVFKATIASMTADRVVLRLRDNQSYAEALPIASCYAVEHDYVDSSFLLQYKGLYAMLDASPHRRGLLVGEAGESPVRNMSRRLSYEYDSPDLSRILLKALQAEDYFLLVGPPGTGKTSVALRNMVREFLAIPDYQILLVAFTNRAVDEICDKLETIGEVDDYIRVGQTLSCDVAYRSHLLSERMKQCRNREEASRSIHSCRVFVATLSSLSGKMELFNLKRFDVAIVDEASQILEPQLVGLLSAKTPTGRDAIGKFILIGDHKQLPAVVVQSAEESVITDERLRSAGFVDCRISLFERLYRRLPEGSPFADMLDCQWRMHPDIASFANTYFYKGALRDGNAPHQISLLPFTNMGDDKWERVIATKRTAFFPTKTLCAGKKYNNEEACKTAAIVNALYRLYERNGLEFDERSVGIIAPYRHQIARIRQELDKFGISAFDTIRVDTVERFQGSQNDCIIYSFCVNDESQLEWLPSYTEESGQLIDRKLNVALTRARRQLFVLGNSRLLSRNPIYRILITHLENISSEMEYTRTIPANYRLSLFYRKRIHDKIDRIYLGWWGRMGIFVLKMNIYLGNLNYGVKEQDLQTLLEGFGAIDSVKIIVDRESGRSKGFGFAEMSDDEAAKRAIEELSGKEFAGRALVIKEARPRAMARINLSGMGVALITPFKEDESIDFEALSRLIEYLIQNGTDYLVVLGTTAETPTLTEEEKTEIKRFVVERTKGRIPLVLGLGGNNTRGIIDHLKKDDFSGYDAILSVVPYYNKPSQEGIYQHYSAIAQASKLPVILYNVPGRTGVNMNAETTLRLAKEYPNIIAIKEASGNITQMDDIIKNKPADFMVISGDDGITFPLLTLGAVGVISVIGNAFPKEFSKMVRLALNGDFHNALSIHHRFTELFSLLFVDGNPAGVKCLLNAMGYIENKLRLPLVPTRITTYEKIRAVLQSLHYIPMLFSFITKWAIKRQLKRRQSDGFCPFGGAKRLVLMAQGKDVQSLLPGIQEMVRAGIDVTLVIDTHRKDKVSVEVPGCSPILVLQTCWLLKRPTRAFLRNFDNNDGDVLIDVSISKSLPLLYLAVRSRSIFKIGVPKGESNPFNLQILLPESSPRGGVAEDGDTGVGRSKPNAGELLQSALFYWKKIGVKENNLMESPQEKIERLRRELDEHNYNYYVLNAPTIDDRTFDEMMHELQGLEETFPQYFDPNSPTQRVGNDINRSFSQVEHRYPMLSLSNTYSIEEVSAFYERVRSGLMGEDFELVGELKYDGTSISLIYEGGRLVRAVTRGDGTRGDDVTENVKTIRSIPLQLRGNDYPDSFEIRGEILMPWAVFDALNKEREEQEEPLFANPRNAAAGTLKSQNSAVVAARGLDAYLYYLLGENLPADTHYENLQYARSWGFKVSDAVRKLHSVEEVKEYINYWDMERKNLPVATDGMVFKVNSLRQQKNLGYTAKSPRWAIAYKFQAEKALTRLNSVSYQVGRTGTVTPVANLDPVLLSGTIVKRATLHNEDIINALDLHIGDMVFVEKGGEIIPKITAVDTSARLLIGEKVRFIRACPECGTPLKRIEGEAAWFCPNEKGCPPQIKGRIEHFISRKAMNIEGLGSETIGQFYSLGLVRDASDLYTLQPDVIAGLERMGERSAQNIVDAVKQSCSVPFERVLFALGIRYVGETVAKKLALALHSIDRIIEATTEDLIRIGDIGVRIAQSVVAYFSDEDNLRFVERLRQYGVQMQITEERLSERTDKLSGATIVISGTFTHHSRDEYKALIEQHGGINTGSVSGKTTYILAGENMGPAKLEKARKLGVRILSEEEFLEMIQMLQSKSLCGVTLQYNIEGDGYPVILMHGWGCNHTTVQSIERLLSPHFKVYNLDFPGFGGSSTPPSIWGVEEYTQMLEAFIKDENIEAPILIGHSFGGRVSILYASRNKTHKVILVDAAGIKPKRPLKYYLKVYSFKLWKKVLPLVIGKKQAEKTIENYRRKSGSADYNALTGIMRNIIVKVVNEDLKAVLPKIQCPVLLLWGKNDTATPLRDARIMEKLIPDAGLVAFDDAGHYSFLDKPYEFNTVLQNFLQDDIKRKSMNEILTLVTFLALLFYTGIEMKFQLQMLQQNSYRNDRYNRWLKGESFATISRLTDLFLLLLLSTNFLPTFVQIVTITVVLAKSVKGLQTKYKKPLVFTKRATRLYIAALSLSLLVAGLAAGLTTLSNGSRALLAIAILAPYFMMAANIIMQPVEKRINRKYYDEAKQILSQMQDLTVIGITGSYGKTSTKHYLYRILCERYNVLMTPGSFNTPMGVIRTIREQMKPYHNIFICEMGAKQIGDIKEICDLVAPQIGIITAVGEQHLESFKTIGNVQRTKFELVDALPSSGLAVINNDFPYIANRPVENVPVKRYTIADTGADYHIEDIRYDTDATRFTVVGGGERIELSTKLIGECNLSNLMAAVITARHLQVPVPSIQYGVSRIEQVEHRLNMKRTPGGISIIDDAFNSNPDGARMALDVLRRMTQGKRIIITPGMIELGEKQVEYNYLLGKQIAEVCDYVMVVGRYNREAILKGLQEKNYPEDKVFVADTFADAQARLAQIAQPGDTVLYENDLPDTFKMKTTVGVFFGGRSTEHEISVISALQAINAFNKEKYEIIPIYITKQGRWFSGDALLEVKNYRDMAALQNMCAEVYMIPEYGDYNLYRKKRALFGNNIWAKLDVVIPVLHGSNGEDGIFEGILESIGIPYAGCNTLSSANGMDKITMKMIMEKSGIPIVDYVWFTDKQWFAQRDKLIEEIETRLGYPVIVKPANLGSSVGISHADNREELIAKVDVAEKYSTRIVIEDMVEELKEINCSVLGDCDDYRTSVCEEPIKSGDILTYEDKYMGGGKSNKGMQATQKRIPADLSPEDTARVQFLAGETFRVLSCHGVARVDFMIDGKSGDIYVNEINTIPGSLSFYLWEASGIRFDQLMDKLVDLALKRKRESSMKTVSYDQNIFNLGKGLKGGKMGAKQPMINLFFIEEVAGREVRRFCFMGIVAFVSFRGCKWIIYPLYIANTAPRMLRDTAGEKGYVRYKPVGEMSFSIPPSLRATSPMANATQGRSMADDKKIIFSMVGVSKMFPPHKQVLKDIYLSFFYGAKIGIIGLNGSGKSTLLKIIAGVEKSYQGEVVFSPGYSVGYLEQEPKLDPEKTVKEVVQEGVQPILDLLAEYEKVNESFGDPDVLEDPDKMEALIARQAELQDHIDASDAWNIDNKLERAMDALRCPPEDQLVKFLSGGERRRVALCRLLLQQPDILLLDEPTNHLDAESIDWLEQHLQQYPGTVIAITHDRYFLDHVAGWILELDRGEGIPWQGNYTSWLEQKTKRMEMEEKQASKRRKTLERELEWVRMAPKARQSKGKARLNSYDKLLNEDQKEREEKLEIFIPNGPRLGNKVIEAHGVAKAFGDKLLFDNLDFVLPPNGIVGVIGPNGAGKTTLFKLIMGQEACDKGTFEVGETVKIAYVDQTHKDIDPAKTVYQVVSGGLETFRMGGRDMNARAYLSRFNFTGADQEKLIGVLSGGERNRLHLAMALKEEGNVLLLDEPTNDIDVNTLRALEEGLENFAGCAVVISHDRWFLDRICTHILAFEGDSKVFYFEGSYSEYEENKKKRMGDVEPHRVRYRKLMEMVLPVYLYGHPVIRKETEEIDASYPQLKELIENMYETMYATEGIGLAAPQIGLSIRLIVIDVNPMAEYFPECADVKLTLINPVLEVLEDGSKETREEGCLSLPGIHEPVPRIEKIRLKWLDENFQPHDEVIEGYLARVVQHEYDHLEGKVFIDRISPIRKQLIKSKLTNIIKGKVRCDYRVKATPLKKMLYSRLYVSLYSNMARILSIDYGRKRTGIAVTDPLQIIANGLTTVASSQLIDFLTQYMQRESVERVVVGLPRQMNNQPSESMRYITPFVNRFKKLFPNVPIEFFDERFTSVLAHRAMIDGGLSKMARRNKELVDEISATIILRDYLESKKQMNKFSVIFKLSFINTIFFYLPVLANNSPVDYVNTLVGTQSKFELSTGNTYPAIAMPWGMNFWTPQTGDMGDGWTYTYNADKIKGFKQTHQPSPWMNDYGQFALMPVTGGVVFEQNQRASWFSHKAEIAKPYYYKVYLADHDVTTEMTVTERASLFRFTFPEEQNSYVIVDAFDKGSYIKIIPEENKIIGYSTRNSGGVPENFKNYFIIVFDKPFQFTAVALDNAIKTNQTEIEGNHAGGIIGFSTHKGEQIHARVASSFISFEQAELNLQELGDGDFNRLTEEGKNRWNEILSKIEIKDNDIDNLRTFYSCLYRSVLFPRAFYEINAEGETIHYSPYNGQVLPGYLFTDTGFWDTFRSLFPLLNLIYPSMNEKMQEGLVNAYKESGFLPEWASPGHRDCMVGNNSASVVADAYIKGLQDYDIELLWEALKHGANNHLKGTASGRVAFEAYNRLGYVPNNIGVGQNVARTLEYAYNDWCIYTLGKKLGKPDSEIEIYKQRSLNYKNVYNPSEKLMVGKDDRGKFNPRFSATDWSGDFCEGNSWHWSFCVFHDPQGLIDLMGGNEAFNHMMDSVFVIPSYLGIKSRGVIHEMREMQVMNMGQYAHGNQPIQHMVYLYNYSGEPWKAQYRVRDIMEKLYSATPDGYCGDEDNGQTSAWYIFSALGFYPVCPGTDQYIIGTPLFKEAKLHLENGKCLTIEAKNNSATNKYIRSIKLNGKNHTLNYFKHNVLVEGGKIQFLMDNEPNLKRGSTKETVPYSFSLANEMNCKNSIGILSVIIILLCGCQPDKKTTFTAASYNLRNANSADSLQGDGWGNRCPIIAGLVQFHEFDIFGTQEGLRHQLDSLKTSLPKYDYIGVGRNDGKKEGEHAAIFYRIDKFELLEHGDFWLSETPEKPSVGWDAVLPRICTWGHFKYKETGFEFLFFNLHMDHIGKQARVESALLVQQKMKEIGENLPALLTGDFNVDQTHRSYLALTKSGILRDAFEVADLRYAINGTFNGFDSDNYTESRIDHVFVTPTFHILKYGVLTDSYRRMKEGAQKASVKDCPEEISIRRYESRIPSDHFPVMVKLAVCDKNMKSIAKVSCLCLALGYGFSYTHAATARVATAQQDNTRIQYTSNRPQERLFVSNAVEEQIKRVKSLLTNARLAWMFENCFPNTLDTTVHFDGDDDTFVYTGDIHAMWLRDSGAQVWPYVQLANQDPRLKKMLAGVINRQFKCINIDPYANAFNMGPTGGEWMSDMTDMKPELHERKWEIDSLCYPIRLAYQYWKVTGDTSVFGEEWIQAITNVLRTFKEQQRKEGNGPYKFQRKTERALDTMTNNGLGNPVKPVGLIISAFRPSDDATTFQFLVPSNFFAVTSLRKSAEILRKVNHNEKLAKECSDLAQEVETALQKYAVYNHPKYGKIYAFEVDGFGNQLLMDDANVPSLLAMPYLGDVDINDPIYQNTRKFVWSEDNPYFFKGSAGEGIGGPHIGYDMVWPMSIMMKAFTSQNDQEIKECIEMLMKTDAGTGFMHESFHKNDPKNFTRAWFAWQNTLFGELILKLVNEGKVDLLNSIDIQMRVKIKKIDCLPTTNLLNLKSNTMKNTVQIYCFYMFYNMFSEKIILILCYFNIMNVKLLKNLAFLGLLSFSVFPSFALSKIIPDGTIPYNMGVQLKGDTDGPEDLDRVQELGMKWVRRGFIWESIEREKGVYDFSQYDRFVNDCEKRGLKIIGCMAFSNKLYGHVKDEPARSAYADFAAELVKHYKGRNIIWEIWNEPNTMTFWGRHGKVGNSPQYAREYTDLVRAAVPAMKKANPDCVILAGSVSNMWSESYKWMSYCFADGMLDIHWDIWSVHPYGVKAPEDYMEAYSHTRNLMKKAGGDTGRLWINSERGFPLGKAEGYAGGDPSLAYEYQAWHVIRQYLVDLLEGLPVTIWYEWGGKEGFALYRAGNMTPAYNACKTFVKELSGYKLDCRMKTENKRDFVLRFIDKNGNEKLVAWTAPGVMESPDKIVPHSIKIAVGDVSPRLVTTDLYGRTDIVEVSNGVIEPCLTGAPVYITLRMMHRFSKIGLLVSILSVFMFPSCHKVEVFEDDPYGNFDALWTILDERYCFFEYKNIDWTQIRTKYRKKLTSRMTSEELFSVCNDMLMELKDGHVNLIAAHDTSRYWDWLYGSPTNYDERIIDEYYLNFDYRYTSGIKYKILPQNVGYMYYGSFSSTIGDGNLDQILAYLSTSTGLIIDVRSNGGGSLSNVETLVSRFINRKTVVGYISHKTGFGHQDFSELYPIEYSPSSRIRYQKPVVVLANRGTFSAGNNFVSVMKALPNVIVIGDCTGGGSGLPFSSELPNGWSIRFSASPIYDIERQHTEFGVEPTEGFKMDMDSEQASKGHDTILDRAISYITGSMTKCKAILRAILMGITFSIFSPLCVSAQEKDSEKPLRPVTSVFTVELGRQSALDTYLTPIRYWGLDVALGYERLRAVSFAPEKWFTRHNVSGSFASMTNQSGSGSMLSFYLDYSFAMLRRWQLLDRLYVSGGGEASLTLGGLYNLRNSNNPATAKAAIDLGATAMASYHFYISRLPVTLRYQVSLPVIGTFFSPEFGQSYYEMFGIGNCSGIVHFGAWHNRVDVRNYISVDLHVGKRALRLGYRQVMRTTHINSIDTQVLTHTFVLGISGEIFRAAPSDRRIVSVYYMSDEITTPQEDMPQDRSAESEVSAESHSAYKVPVSDKPDIKFQLSGMFQNWFLDYASYVILERAVPHLADGLKPVQRRILHAMKLLDDGRFNKVANVVGHTMQFHPHGDASIGDALVQLGQKDLLIECQGNWGNILTGDSAAAPRYIEARLSKFALDVVFNPKTTEWKLSYDGRKKEPVTLPVKFPLLLAQGVEGIAVGLASKILPHNFNEILQAAVDYLRGEEFHLYPDFQTGGFIDVSKYNDGERGGSVKVRAKIEKIDNRTLSIVEIPYSKTTSTLIESILKAQDKGKIKIRKVDDNTAQHAEILVHLIPGTSSDKAIDALYAFTDCEVSISPNCCVINEDKPHFMTVSDLLRISVENTKELLHKELLIQKGEAQEILHFASLEKIFIEKRIYKDKEFEESRSMDEAIAHVDKRLEPFKPSFIREVTSDDILKLMEIKMARILKFNSEKADELIAAKKEQIAQIDYDIDHLVDYTIKWYDSLKEKYGSRYPRLTEVRSFDTIEATKVVEANEKLYINKEEGFIGTSLKKDEFVCNCSDIDDIILFYRDGKYKVVKVSEKMFVGKNLLHIAVFKKNDKRTIYNAVYRDGKAGLHYMKRFAVTGVTRDKEYDLTQGKPGSRVVWFTANPNGEAEVLRVTFVPKPRMKTLFVDRDFSEIAIKGRQSMGNILTKNEIHRISLKERGGSTLGGRKVWFDRDVLRLNYDGRGEYLGEFHGDDQVLVVLENGEFCTTTSDATNHYDPNILRIEKFDPDKVWTVALYDAAQGYPYLKRFVFEAGSRKQSFLGDNPDSRLLLITDTAYPRIEVAFGEGDSFREPMVVDAAEFIAVKGFKAKGKRLTNYSVATINELEPLRQEDDSVVEDDSSVETDTLMDSNVDKPEDSASGQMTLFMAQEDVFKKLVSHCKEYGFVFPSSEIYDGLAAVYDYGQMGVELKNNIKKYWWDSMVLLHENIVGIDSAIFMHPTIWKASGHVDAFNDPLIDNKDSKKRYRADVLIEDCIAKMDEKIEKEVEKAAKRFGDSFDEKLFRETNPRVLEHKAKRDELHARYAQAMNDVDLNELRQIILDYEIVCPISGTKNWTDVRQFNLMFSTEMGSTADGSMKVYLRPETAQGIFVNFLNVQKTGRMRIPFGIAQIGKAFRNEIVARQFIFRMREFEQMEMQFFVRPGEELKWFAKWKETRLKWHKALGLGDQKYRFHDHEKLAHYANAATDIEFEMPFGFKEVEGIHSRTNFDLGNHEKFSGKKIQYFDPELGESYTPYVIETSIGVDRMFLSIMAAAYCEETLEGGDSRVVLRLPAALAPVKVAVMPLVRKDGLPEKAREIIDNLRFDFKCQYDEKDSIGKRYRRQDAIGTPFCVTVDHQTLEDNTVTIRFRDSMEQQRVAIDQLQNIIGEQVSLKTLLKKIVEMKYFVRAILATIIAALLSSCSYNSMVEADENINAQWAKVENQYQRRADLVPNLVNTVKGYAAHESETLEAVIAARSKATQITVDPANLTEENLQKYQEAQGELSSALGKLLAITENYPDLKANQNFLELQAQLEGTENRIATERSRYTDAVNAYNKKIRKFPALITAKIFGFDAKPQFKAEASAAQAPTVEFMKKLPIFLLICLLIGIVACKETEDYWTQYEQWRETNESWFIEQLGAKDEKGNPIYTKVVPSWDHSIYVLMKYYNDTSLNRDAQSPYQTSTVDVIYKGMLYDGTPFDSSYLRTDSIYRTQVKQNIKGWIIALEQMKVGDSCRVIIPQTLGYGAQYMSSLILPYTTLVFDMKLVDIPGLDKPVTEMPLHSPFTIFELKLEDTFARLNKIKASFVLLRSRLFVYLMPLHSPFAIFVCKYENKLHIARISFLELHYFCKANVTQRKHEMIYIEKELDDLKKEVLEMWDLVNSQLNRAGEALLSMDKELAHEVTYREKRVNAFELKIDSDCEDIIGLYNPVALDLRFTLAMMKTSNNLERIADFCDGIARFVIDYPEVNIESELFEKTGIKEMLDIVKAMMLQAENALIEEKSSEAIAVFNKDNRVDELNHAAVPIIAEYLQQFPERAIECLNLISIIRRLERIGDHCNNIAEEIVFYLDAKILKHAGKRSMKHFIIAIILFFGISSMHIYSAETATVEIPDMEKIENAVRDSRSPYYYPDLMKKYLGNDTTMTLQDFRHLYLGYASQEDYNPYRTVEIPERIEKLYAQTVHTESECDSLIQYARIALSDIPFDLRQINFLIYGLRQKGETEEANLWEYRLKGIIQAILSTGDGKAPETAWFVIYPADEYNIVNRQGFTATEFTFVEPYFDYISIEKNPLKIEGFYFNVKKLLKEYNRKFYERMEIKPGKFVVLTYDLYAGAGEPEETLMMRATDEMPDQFVFGVDQNILPSMLKRLEGLKQGDKFDFVLSCEEAFGERNEEHVMELDKEIFMVDGKFDDQTVFEGNTVPMMTSEGYRINGSVLKVTDDKVLMDFNHPLAGENLHYVGTVKLVRDATEEELHPRHSCGCGCGHDHGSCGDGCGDCCDGCHMICKNCGTEFEGNFCNHCGQKSTVERLTWRSVWDNILHGIFHVDNTFVKTTRTLVVHPDRLISDYFAGRRKGYMAPIPLLAVWCVILLFFGHIEGGAGTISTIEGSATHNWIVEHYTLLTIVTVPFMVLAVKIAFRKAGAARYNWVEYLLGCCYLSVLYILLSLVLTPIGWVLDASYYTVYGWTSMVLCLLPTYWAAYSFFPDKFWKTLGRTLWASVLYLLFSVIIAVGVMLIIGYMKKIRNVENPFEFETVVFSFSEEQILRELIAESSYVAKSLVGQSDLKSGWSRSIIFSEDDKPFLSRWLADARDEMMRSLSAYLSDESVSTETALVFAVLLSRQRPLALDESICHQLERAIVHHVLNQWFATKQPEESARRQLQYKGAMSAVKSDIRLACNRRPHRPTNYFMKRFPYILCIVFPVFVWACHTSRQTIGEARENRVHSIDRDLHVVIDSLCRNEWSGLTEWEWTHVDVFDSMQDKTVNPSISITRLKQSKKVVARNETAVSDSLNETAALQSRSEKEQNHRSSKEMDTHRVSGCVLMIFIVILFFYIIRRKMELYYKEERDRDLFRAYNEALKSLGKMAVNVPREQIVRRVVYSIAPRFYISYEEARRNVKRIFKGYSPRCVSSTRTEMYNDLANMLASYLRRRPQVPFNDALCTILAEKRAPRFYLSERSALLTIYRMQKGGVSMNFRTAIDFPGNPGYIDHRQQILLLGSCFAENIGLWLQQRKFNVDINPFGTLYNPLSIAQSWERIVEGKAIIENELFAFNNLWHSYDHHSRFSGCDKKATLSLMNRRIEKIHRQVPNIDRIIITWGTAYVFRLKETGKVVANCHKQPASIFDRVLLSVDEIVSRWRDIIKHIEDNLPQCRILFTVSPIRHLSDGAHGNQISKSTLLLAINRLQQEFGICDYFPSYEIMMDDLRDYRFYDTDMTHPSKSAIAYITEILEEAYLSPESKEIASQWYKIQRALEHRPLMPDKDEYTIFLQHTLDKVMRFQQMYPYINVSNEITELNTRISQIMNYTITEIATIVKAQKRAYKDYTITALLTDSRSLTFPEETLFFALVTERNDGHRYIKDLYRKGVRNFVVEHRVADEELMPEANFIIVKNTLDALQQLAAAHRKKFDIPVIGVTGSNGKTTVKEWLYQLLQPDYNTVRSPRSYNSQIGVPLSVWQIGSKTEMAIFEAGISQPDEMIHLEEIIKPTLGLITNIGEAHQEGFQTIQQKCIEKLTLLKACDCIIYDGDNELICECVEKLCFGCREIAWSRKDRDKPLYISKIIKGNDSTKIEYTYLQYHSYITIPFVEDASIENAIHCLAVMLYYNRPPEAITDRMKRLTPVAMRMEVKEGINNCLIINDSYNSDINSLTIALDFQNRRAAAKGMRRTLILSDIYQTGLPPASLYRKVADIILHKGIERLIGIGPVISDNAYLFNLEKEFYPTTESFLAQLDPADFHNELILIKGAREFHFELISETLELKQHETILEINLDAIVHNYNLFKSKLRPETKIICMVKAFGYGAGSYELAKTLQDRGADFLAVAVADEGAELRKAGITMPILVMNPEMSSFRTLFSYYLEPEIYSFELLRAIIAEGEKLGLAGYPVHIKIDSGMHRLGFEEKNMEQVVEILNDQTVVIARSVFSHFAGSDEKRFDDYSHRQIETFSRCADYLQQHSKHKILRHILNTAGILRFPEYQMDMVRLGIGLYGVSPIDTPCGLETVSTLKTTILQIKTLSAGETIGYGRKGVLSRDSRIAAIPIGYADGLDRHLGNGKGCVVVNGKRAAIVGNICMDVCMIDVTDIDCKPGDRVEIFGEQLPVTEIAEKLDTIPYEILTSVSTRVKRIYYREMSSELVVDVQPKEISIALLENNRLVELQKEARNISFSVGDIYLGRVKKLMPGLNAAFVDVGYEKDAFLHYLDLGTQYNSSAKFLKQSLADRKRVLSLSKFDLLPDIEKDGTINDALKVGQEVLVQIAKEPISSKGPRLTAEISFAGRFLVLIPFSDKVSVSQKIKSNEEKLRLRQLIQSIKPRNFGVIVRTVAEGKRVAELNNELKTLVRCWEDMLVKLQKAQLPSLVYEETGRTVGILRDIFSPSFENIYVNDKETYNQIYNYVSLISPDRKDIVKLYDGELPIFDNFAITKQIKSSLGKTVSFKSGAYVIIEHTEALHVIDVNSGNRSKASSDQESNALDVNMNAAEEIARQLRLRDMGGIIVIDFIDMDEAENRQKLYDRMRELMANDRARHNILPLSKFGLMQITRQRVRPALDIITSEDCPTCHGKGTIPPSLLFTDLLESKIHYLVYKLKIKKFTLHVHPFVAAYVNQGVFSLKMKWRCKYTFQLKVIPNQSLAYLEYKFYDAERNEIDLKEEIEIKKMQSKKLKTILFVNIIIYSKMTKADIVNEISKNTGIEKAVVLETVEKFMESVKGSLAKGENVYLRGFGSFIVKKRAQKTARNISKNTTIIIPAHNIPAFKPAKTFMGEVKMEIIIIVLLILCNGVLSMSEIALVSARKVKLENSAKKGSKAALSALKLSQDPDRFLSTVQIGITLIGILTGLYSGEALAQSLAKLLAKSSLLAPYAVGLAQAIIVIIVTYLTLIIGELVPKRIGMIASERVAKIVSRPMSWLSYIASPFVWILTKSTAGVCRFLGLSSQKEGITEDEIKAIVREGTEGGCVQEVEQDIVERVFNLGDRNISSIMTHRSDLICLDVQDDNTTLKSKITSDLHAVYPLCEDSLDNIIGIVSLKDLFGKIDDKNFDIRAVASTPYFLPENMSVYTAMERLRNENQRYGLVTDEFGSIEGIVTISDILGALVGSVSSGPSADIIIREDGSCLIDGQCSFYDFLDHYDMTDRYQEYNYNTLSGLILELLQHIPTEGEKIEWLCFTFEIVDMDGARIDKVLVQKNETDNITLMTKTKLNIESWNRKEHFRFFSAFDDPFFGITTNVDFTTIYLEAKRNSQSFFLYSLHHILTKANETDEFKLRIEEGNSVVKYDTIHVSPTIGREDGTFGFAFFEYIPDRNEFIQQAIQEITRVKNSTGLSFSKNTGREDVIRYSSIPWLSFSEMKHAVSFKNGDSVPRISTGKLIDTNGKMLLPISICAHHGLMDGKHIAQFLNKLSEPMNRSFSLPFLIMGVVFCVCLICSNLLEVKMISLGGITATAGLIVFPISYIINDCIAEVWGYRKARLIIWLGFLMNLMAIIFIQIAIILPSALFWDGQKSFETVFSSTPRILLASFIAFLVGSFLNAYVMSKMKISSKGKHFSLRAITSTVVGESADSLLFFPIAFGGVVPVNELLILIVTQACLKTAYEIVILPVTIRVVRFVKKIDGSDVYDQKVSYNIFKIKELQMKSETSQLTLLGHKTVYKQDYAPEVLETFINKHPENDYWVRFNCPEFTSLCPITGQPDFATIQIDYIPGEHMVESKSLKLYLFSFRNHGAFHEDCVNIIMKDLVKLMNPKYIEVTGFFTPRGGISIYPYCNYGQPGTEYEQMAKQRLQNHRMATGEKRYRDFSDFLNLHFDCKVQKISLHAGFTCPNRDGSIGVGGCTYCNNQTFSPDYCHTGKSITSQLEEGIAFFARKYPEMHYLAYFQAYTNTYGELAVLKQKYEEALFHPGVVGIIVGTRPDCMPDGLLEYFADLSRHTFVLVEYGVESTCDETLRRVNRGHDFAASVDAICRTAEMGIAVGAHMILGLPGENREMILSHADKMSRLPLDTIKLHQLQLILHTRMAAEYKSNPNDFHLYDVDEYIDLAIDFAERLSPHIAIERFVSQSPAELLIAPNWGIKNYEFTARLLKRMKERDTWQGKLFTEVMDTKKYIDSHRERFFNELFSLLRIPSISALPEHRKDMQLCAERWRDLLLEAGADRAEVMPTSASPVVFAEKIVDRSFPTVLVYAHYDVMPVEPLELWHTEPFEPVVKDGKLWARGADDDKGQGFIQLKAFEIAVKEGLLRCNVKFLIEGGEEIGSPGVEAFCKEHLDLLKCDVILVSDTSMVGLDTPSITTGLRGLAYWEIEVTGPNRDLHSGIFGGTVANPINELCKMLAGVVDENGRITLPHFYDKVETVSTQERAMLGAVPYDEEKYKAAIDVEALSGEVGYSPLERTAIRPTFDICGIWGGYTGEGAKTVLPSKAYAKVSCRLVPHQNHEEISKMFIDYIYSVAPRSVKVKVSPMHGGESYVCPINLPAYRAAEKGYELAFGKRPLAVRRGGSIPIIATFEKVLGVKSVLMGFGLESDATHSPNENFLIEMYEKGIIAVVEFYNQFGHMNTFGNLFTLTSFGESHGRAIGGVVDGMPAGIPVDMEYIQRELNRRRPGQSSIVTSRKENDRVEFLSGIFEGKTTGTPIGFLVYNENQHSSDYDNLREVFRPSHADYTYTQKYGVRDHRGGGRSSARETIARCVAGALAKLVLTRLGIEVWAYTSQVGELSLSGDYNRYDFDEIEKNPVRCPDADMAKRMEEYIGKVKSEGDTVGGVVTCVVRHVPAGLGEPVFDKLHAALGSAMLSINAVKGFEYGMGFGGVRYRGSQMNDVFETQQGKIVARTNHSGGIQGGISNGEDIYFRVAFKPVATLLKDIETVDSQGNPTVLRAKGRHDPCVLPRAVPVVEAMAAMVILDYYLLAQSHKLMKSIKIMSCILAAGMLFTSCNMSNTGKGALIGGGSGAAVGAGLGAIFGKGKGAAIGAAVGAAVGTTAGALIGKKMDKAAEQAKQVEGAQVEQVTDNNGLQAVKVTFDSGILFSTSSSNLSSSAKSSLSKFANDVLNQNRDMDVTIYGYTDNQGWKNSTAEQSYQKNLNLSQERAQSVASYLLACGVSTNQIKSVQGMGEANPIADNSTAAGRQENRRVEIYLYASQQMIQQAEAGTLMKTVYLFLATGFEEIEALTIVDMLRRAEIDITTVSISRNLQVEGAHGITVTADCTWVELSTEDADWLILPGGMPGTKHLGECKPLVSLLQRQAAANKNIAAICAAPSVLGQAGLLNGYKATCYPGFEQFLTGATVTGDNVTVDRNITTGKGPGAAISFATAIITQIAGEEKAREVTSGMLLMLTAKEIRESFKDFFRERGHQIVPSAPMVIKDDPTLMFTNAGMNQFKDIILGNVPAKYKRVADSQKCLRVSGKHNDLEEVGLDTYHHTMFEMLGNWSFGDYFKKEAIDWSWEYLVDVLKIDPARLYATVFEGYASEGLERDNEAASYWEAHLPKDHIINGNRHDNFWEMGDTGPCGPCSEIHIDLRSDAERAEVDGLKLVNQSHPQVIEIWNLVFMQYNRKADGSLEPLPARVIDTGMGFERLCMALQGKTSNYDTDVFQPIIGEIGRLCGKKYGDDPKVDIAMRVIADHIRTIAFSITDGQLPSNAKAGYVIRRILRRAVRYGYTFLGQKQAFLYKLLDILIETMGDAYPELKAQKVLIGKVIKEEEDAFLRTLETGIKLLDKVTADTKAAGKSEISGRDAFVLYDTYGFPLDLTELILKEKGLGVDIDEFNAQMQQQKERARNAAAVETGDWVVLKEGEPEFVGYDMTECDAEILRYRKVKQKAREFYQIVLDRTPFYAEMGGQVGDTGKLISGNDIVEILQTKRENNLSIHIAERLPEDVTATFHAVIDKEARRATACNHTATHLLHEALREVLGTHVEQKGSYVSPQSLRFDFSHFQKVTDEELRKVEMIANRKVREAIPLDEHRNVPIAEAKAMGAMALFGEKYGEEVRVIRFGSSVELCGGTHVSNTGNIGMIKIITESSIAAGIRRIEAITGARVEETMNALQDSLKEIGILFNNAPNLLQAIHKAIDENAELRKQAEEYVKEKMIVLKDRMVKSAESIDGVKLIRFIGPMPSDMVKGIAFLLRGEVSKGLAFVAATRDKDKPLLTVMLSDDLVADGKNASAIVRDAAKLIQGGGGGQPYFAQAGGKNADKLTEALDKMVSSIVGMFLSIFLSAHGYKNNNLGYFCKLFLVILIYRIGDFYFDNEKESRGTMSKKIFYIYNPKTLTYERVYPSLRQRIIVVLRHLFVGSILSIGVIVAFYFWFGSPKEELLKMENEQMQTQYKVLSKRVDAALEVLNDLQQRDDNMYRVILQAEPVNDEIRNNGIYNPSRYENLLQMSDAELVVSTSQKVDNLARQVYVQCNSMNELVKLAQGQEERIKHIPAIQPVSNKDLKRTASGYGYRIDPIYKTTKFHQGMDFSANVGTPVYVTGNGRVIETGWQQGFGNTVVIDHGYDYKTRYAHLSKILVRKGQEVIRGEEIAEVGNTGKSTGPHLHYEVLYKGKAQNPINYYFFDLSPEDYDRMTQLAENQGRVMDMKEPVTNKQKLYYTIGEVSDMFNVNQSLLRYWETEFKTINPKRSPKGTRYYSQKDIEEIKLIHYLLKERKLKIEGAKQVLKHKRESTVRSQQVVERLKSLRSELIAIMEELEMRPFRFLAFVPTIIVLVVITYLSLAKNPVHSQEFYLFEGADKLVHGCMYLGLVWIGCFDIYRVSKFTAPKLILLVCGAIVWGGLMELLQGAMSMGRSADWYDFLANGCGAILGLILGVNSVPYLFKKCKKLSMTGGTGRLILGRNRVICFYSWLTLSLSKDCKSKYFCKKEIIVPFCLLMGERAKFATKLGVIATTVGSAVGLGNIWRFPYEAGMNGGGAFLMIYILCVLILGVPVMCAEFIIGRKSKSDTVDAFKKLIPGSRWYYIGYIGILASILILGYYMVISGWTLEYLFQAACNNLTGKTAAEFKAEQNAFIQNDFRPLLWIYIFLFINYIIISKGVQKGIEKMSNILMPILFIILIVFCIRSLTLPEANEGLKFFLHPDFSKITPQVIVRAMGQAFFSLSLGMGILITYSSYFNNKTHLIKTASTVAILDTTVAILAGVIIFPAVFSYGVDPVAGPDLVFVTLPNVFNQMPVSALWSALFFLLLTVAALTSTVSLFEVAVAFFINHMHLSRKKATRTMMVIVAILSTICSLSIGSWSHIRIFEKTIFDACDYFSAIILLPVGGLLISIFIGWILKRNISREELTNRNKLHEPLFNAIFFCIKYIAPIIIILIFLSGFGIIMALKNDSFFSLSKSERRATLLLIIILLILTGARIAQYYYHSREKVEVTMEYESFQSELEEFNRSLNHQNEKAKNAERQSSKSSRPPKSLKPVPREEMQCLYRQVLLYDFKTYSTMFQWIQKEPLSLNLGGELVSLSRPLIMGILNITPDSFYPGSRTTEEEQIAERLHKMVNEGADIIDIGAYSSRPNADDISPDEEMKRLSKGLDIIRKLYPDARVSVDTFRADIAARCVREYGVQMINDISGGELDSQMFETIAELKVAYILMHMKGTPQTMMQQIRYKHIIPEMLYYFSARIARLESLGINDIIIDPGFGFSKSVDDNYLLMNRLDEFTRIGYPLLVGISRKSMIYKHFGYTPEESLNGTTILNTLALLGGADILRVHDVKEAVEAVKIVSKTIQSVKMFSFGIKDIIDILIVALLLYTLYKMMKESGTISIFTGVLAFVGVWIVVTQILDMRLIGSIMDKFMSVGLLILVILFQDEIKRFLVQLGSHKRWRFFFNFFLKHKDTGEKPYIMPIVHACMNMSKTKTGALIVIEQGVSLDNYKNTGDTINANVNARLIENIFFKNSPLHDGAMIIADDRIASAACILPVSHNTRIPKSMGLRHRSALGITEVTDALAVVVSEETGNISLAHNGKITTKISGKDLERMLAQESIDMWSLRALIGRLRPSNKSMVICVNEAGTLPSLIASHLKYRIVELTLIGELNGTDLRYIREMSGCDANGKETGGCLSVLDLSGVNIVDGGNTYYGNYSASDNKIGDYTFYKCARLTRVIMPDNLLSIGEGAFGCCYNLSSVVIPDKVRDIGELAFYRCESLGVVSIGCDVNTIGVYAFRSCISLKEAIFVDGNKPLQVGDNLFYNCPLEKLYVGRDLKFENFSFGKIKTLMTVVFGKEVTCIGDHLFTGCLRLKDIYIEAPIPPAVADGFNPSILSEVILHVPSCSRVIYAERFPWSDFVSIQMFMLQHNTIAILLSNFCIASQILGMVSAETNENLISNLTMPNHILYSYLQIMQKIRNIAIIAHVDHGKTTLVDKMLLAGHLFRENQNSGELILDNNDLERERGITILSKNVSIRYKDYKINVIDTPGHADFGGEVERVLNMADGCLLLVDAFEGPMPQTRFVLQKAIEMGLKPVVVINKVDKPNCRPDEVQEMVLDLMFSLDATEEQLDFPTIYGSAKQGWFSTDWRKPTDNITALLDAIIEYIPEPQYLEGTPQMLITSLDYSPYVGRIAVGRVHRGELKEGMDVALCKKDGSVVKQRIKELDVFEGMGRAKVQSVGSGDICALIGIENFEIGDTIADVVKPEALPRIAIDEPTMSMLFTINDSPFFGKDGKYVTSRHIADRLTRELDKNLALRVERGDTDDAWTVYGRGVLHLSVLIETMRREGYELQVGQPQVIIKEIDGQKCEPVELLTINLPEEYASKIIDMVTRRKGEMVSMTTQNDRIHIEFHIPSRGIIGLRTNVLTASAGEAIMAHRFLEYQPWKGDIDRRTNGSLIAMEAGTAYAYAIDKLQDRGRFFIFPQEEVYAGQVVGENAKDNDIVVNVTKSKKLTNMRASGADDKARIVPPVIFSLEEALEYIKEDEYVEVTPHHLRLRKIILDETERKRANRMGVFFSIIIPVYNGEQYIKNCLDSIYRQGLGDDDFEVICVNDCSTDNTAQVISEYGKFHQNIRLINHETNRRQGSARNTGVKVAKGDYILYIDADDTFESNALPLLRNVIEKNKDLDILKFDYALVERNGSTKNIIEEFDSQDVMSGHDFIKRNSIPWSSWLCAYRRLFLLENNILFRENVRFEDADYIINCIRIANRIQYAAIVVYNYIMYDSQTTKIRCEKNKIVNFFEQSDRIKEIAYKEQDKDVSNCIMRHHFFMYKMNILRYWWRLSYKDRKELLVTYQPMLPCKDKLVSFIGRYPRLFFMVSTIVKPLLPGLRYVYLKIKDRKSSLLMIHIGSLIEKKLREQGRTVTWFATALHCDRTNVYKIFQKSSIDSSMLYRISCILGYDFFSEYTQSFDKGVAKKSTKSMFILSFFYLSLYLQNFTLNTPVSGYVLFVFKPDGGVEFFIRKGVYKRLSLECRISQIMWQFAIFAGDKMGLGVIKLGMRLPFASAHTFPCICKYRFFCIRSKHAVETEISVLLFYNNLNSCMLGNATQPVGQRLASLDILRGFDLFLLVFLQPVLVSLGACVDSSVMNAVLYQFDHEVWEGFRFWDLVMPLFLFMTGVSMPFSFSKYERVESRWFIYKKVLRRFAILFLLGMVVQGNLLGLDLKYIRLYSNTLQAIAAGYLIAALIQLNFSLKGQMGMTFLLLLAYWFPMTFFGDFTPEGNFAERVDRFVLGRFRDGVYWNADGTWSFSSDYHYTWILSSLTFGVTVMLGVFAGRMMKEGAFHRQKVARRLFLVGVALIVAAWAWSFQMPVIKRIWTCSMTLLSGGYCFLLMALFYYWIDCKGHDWGLNWLKIYGMNSITAYLLGEVVNFRCVVASVSYGLERYLGDYYSVWLCFSNYLIVFFILRQLYKRNVFLRIMYLDSEKKKEIFEKYGKSNTDTGSPEAQIALFSYRIAHLTEHLKSNHKDHSTERALKMLVGKRRRLLDYLIKVDINRYRAIIAQKELGIRKMKHFPESEFIINADGSVFHLHLQPEQLRDKIILVGDPGRVDLVASFFDTREFEVSSREFHTIGGTYKGKSVMCLSHGIGTDNIDIVVNELDALANIDFSTRYEKPQFRQLTLVRVGTSGGLQPRVPIGTPVIAEKSIGFDGVLNFYAGRDRVCDLDFERAFCEFVKWNPLWAAPYVVDADSELVARIGGDDMVRGVTISANGFYGPQGRELRIPLADPELNKKIEAFKYGSQVVTNYEMESSALAGLAKLMGHKAMTVCSIIANRVAHHANPNYKTAVSDLIQTVLERIMKTICFYFQIHQPFRLKRYRFFDIGNDHYYYDDFANDDIITRIAQRSYLPANATLLEMIKNANGKFKVAFSISGVALEQLEVCVPEFIDSMKELVKTDCVEFLSETYAHSLASLCDPEEFKMQVRQHDEKIEQLFGVKPKVFRNTELIFSDDIASMIASMGFKGVITEGAKHILGWKSPNYLYSSAAAPKLKMLLKNYKMSDDISFRFSNYEWSDYPLTAEKFISWVKNYPEEEPIVNLFMNYETLGELQPRESGIFEFMKALPRFAEQEGVGFCTPTEAISKLKPVDMLSVPYPMSWADEARDTSAWLGNTLQNEAFRKLYSVAERVRLCDDRRLKQDWYYLQASDHFYYMCTKYLSDGAVHSHYSPYDSPYEAFTNYMNVLSDFIVRVEAQYPESIENEELNALLTTIRNQSAEIEMLQKELKSARIERHSKRAEAKKAKEAKAAESSKKVVSKKDMKALMFGWEFPPHILGGLGTASYGLTKGMAECGDIDITFVIPKPYGDEDKTFAHIIGAANTPVAWRDVSWDYVQQRYGYCMDPQEYFDLRSHIYADFNYLKTNDLGCIEFSGRYPDNLMEEINNYSIVAGVIARTVQFDVIHSHDWLTYPAGIHAKQVSGKPLVIHVHATDFDRSRGNVNPTVYNIERDGMLHADHIITVSNLTRQTVIEKYHIDPAKVTTVHNAVEPLSDEIKSIEVPHSPKEKVVTFLGRITMQKGPEYFVEAAARVLKKTNRVRFVMAGSGDMMDKMILLSAQRNISDRFHFTGFLRGKQVYEMLKASDVYVMPSVSEPFGISPLEAMQVGVPSIISKQSGCAEILTNVIKTDYWDIDAMADAIYSIITYPAIYKQLREEGEREVNEIKWKYAGQKVIDIYHKVMHNNNMSYLKFDKNLMINLEWSLPKEMLRTNKSGAYHCTTIVDCNTRKQHGLLVIPIPELDKDNHVMLSSLDETVIQHGAAFNLGLHKYRGDCFSPNGHKYIREFNCESVPQTMYRVGGVIMTKEKVFISHENRILIKYTLVDAHSPTVLQFRPFLAFRKANELCVENYVLDQRYEEVANGISCCLYQGYPRLYMQFNKAPQFIFDPHWYKGIEYIKDQERGYPYQEDLYVPGYFELPIKKGESIIFSAGTIEAKPRSFARTYNEELANRHMCRSSFFNCLKNSAQQFYFKTKKGHYLLAGYPWFGVRARDQFIALPGCTLAVGDDKTFEDVMHSSEKALRHFMSSGELDENIGEIDLPDIPLWALWTVYHYAKEKGMEICRQKYGKFVCDILDYIVKGGHPNLFLHDNGLLYSNGKERVISWMNAVVDGRPVNPRSGYLVEFNGLWYNGLRFAAALFAEDKEMASKVEQWNAIADKTAESFVHTFLNDYGYLVDYVDGAMSDWSVRPNMLIALSLDYSPLDKRQRKRALEVVTRELLTPKGIRTLSPKSYGYNPTYVGSQTEREYAYHQGPARPWLMGAYADAYLKIFGISGVSFLERMLIGFEDEMSQTCIGSISELFDGNPPFAGRGAISYAANVGEILRVLNLLKKYNMMHTDYIFEKRGGDFVTPLFMRYVDGIAGHIVSIIDPTEEITVVDMSRLVAGVYLVRTGDKVVRLVKLMEIISFRFQDFLSAFIILFAVIDITGLTPIIIDMKQKGQNIIAWKAAVYSLVTFLAFLFMGNMILNLFQVDISSFAIAGALVIFVMAIEMLLGVEIFRNDGPEGAASIVPIVFPLIAGAGSFTTLLSLRALYGLGSILAALFLNILVIYVVIRNVHILERALGKTGVYVLRKFFGIILLALSVRMFLQNLSIALESFMDSMYDVLLQLPIFQGVSRNKISELIEKMKFHFLKYPDGEKIVTSGEECNHLKFLISGEIRSELITQNEKMRITELIQAPNVIAPDHLFGRDTYFPANLYAVGTVGIMQIEKSSVIQMLQEEPIFLINLLNILSRRSQKALESFTALSSNDLKERLAFWVLSLTQQKSVDIRIICKQKDLYAFFGVQRSVFLSTLDELKEDGIIDYNAKEIIILDRSRLKDMLLGTSKDDFMSKQKKFLTCDGNQAAAHISYMFSEVAAIYPITPSSTMAEYVDEWAAAGRKNIFGETVLVQEMQSEGGAAGAVHGSLQAGALTTTYTASQGLLLMIPNMYKIAGELLPCVFHVSARTLASHSLSIFGDHQDVMSTRQTGFAMLAEGSVQEVMDLAGVAHLSTIRSRVPFVNFFDGFRTSHEIQKIEALENEDLAPLIDQKALAEFRARALNPEAPVMRGMAENPDTFFQHREASNKFYEAVPAIVEDYMQEINKITGRDYHLFNYYGAEDADRVIIAMGSVTEAAREAIDYLMAKGEKVGLVAVHLYRPFSAEHFLSALPKTVKRVAVLDRTKEPGANGEPLYLDVKDVFYGKADAPLIVGGRYGLASKDTTPTQILSVYENLSLPEPKNHFTIGIVDDVTFTSLPPKEELALGGEGIFEAKFYGLGADGTVGANKNSVKIIGDNTDKYCQAYFSYDSKKSGGFTCSHLRFGDTPIRSTYLVNTPNFVACHVQAYLHMYDVLRGIRQNGTFLLNTIWTAEELVKHLPNNVKRTLAQKNISFYTINATKIAQEIGLGNRTNTILQSAFFRITEVIPLDLAIEQMKKFIVKSYGKKGEDVVNKNYAAVDRGGEYEKVTVDAAWANLPDDEKAESKAPEFVENVVKVINAQAGDDLPVSAFSGIEDGTWPAGTAKYEKRGVSAFVPVWNSENCIQCNKCAYVCPHASIRPFVLDEAELAASPYKAGETLEMKVPAAMKGMHFRMQVDVLDCLGCGNCVDVCPGNKNGKALSMSDLESQLGEAPRWDYCAENVKSKQHLVDIKSNVKNSQFATPLFEFSGACSGCGETPYVKLISQLFGDREMVSNATGCSSIYSGSIPSTPYTTNDKGKGVAWANSLFEDFCEFGLGMTLAVEKMRERLVKLMNRAIEGDSCPAETKELFAAWIADKDNTERSIELEAQITPIVKANADKCEICKEIASLSQYLIKKSQWIIGGDGASYDIGFGGLDHVLASGKNVNILVLDTEVYSNTGGQASKATPVGAIAKFAAAGKRVRKKDLGLIASTYGYVYCAQVAMGADQAQTLKAIREAEAYDGPSIIIAYAPCINHGLKAGMGKAQAEEAAAVACGYWHLWRYNPELEAEGKNPFTLDSKEPQWEKFQDFLKGEVRFASVMKQYPSEAAELFKAAEDNAKWRYNNYRRLAKQQWGVEQEDMFYYLCSLFKREAVESFYRTHKYLVEHVESPVKRDLMYQIDKNSRLVGIKGSRGVGKTTFLLQYAKENYGLDRSCLYINLNNLYFTEHTLRDFAERFYGQGGRVLLIDQVFKYPGWSEELKYCYDHLPELKIIFSGSSVMRLKEENPVLAGLVDSYNLRGFSFREYLNLMASTHFPSYSLSDIITNHRAIAQEICAQVNPLDYFPGYLHHGYYPFFLDKSNFSENLVKNINMIMEVDILLIKQIELSYLPKVRRLMYLLSVHSPAPTNVSQLSKDIQISRATVMNYIKSLKDARLINMLYRVGEEFPKKPAMVYMHNTNIIYSNRSVQADPQSIRETFFYNTLHKDHRLNMGSKNAQFLVNRELLFRIQGSVPRSRINPHFYYAVDDLKIGSENLIPLWLFGFVYMKKTVSAILLTGVFAAMPAMVAAASQEEAKTEPSKEIVLNKFKDNWMISLEGGVDFSLGRFDSHADFGKRIAPVFGLNVEKWFSPVIGLRLGADYYGMKGAALWGNGMSGEMLDNTYYKQSYALITPALDVMGDLASLFCGYRERVYSPILYVGMGIPVAVSGDGDIADCVNMGMRGGLLNRFRLSDAWAINLDLRFDVFEETVAGEGNHAKTLSALVGVTYKFKGRGWNAPVVPVVAPVVGKYSDAEGDALVAQLRDANRKIADLEQQLAECKNRPAEKIVEEQAPVVTVYYNINSSELQGKDRVVLKAVAKAIKANKDTKYVITGYADSETGTAAFNAKLRKARAERVYDALVSYGVSPDQLEQKTSDAKLDRFGSYILDRAATISPAKMLLHSLCLFVNFWRFLCLYTHELYYFCKKIPMNDTNLLNKSADNIRVLTAAMVEKAKSGHPGGAMGGADFINVLYSEFLVYDPADPKWINRDRFFLDPGHMSPMLYSVLAMSGFYTMDDLKSFRQWGSITPGHPEVDVMHGIENTSGPLGQGHTMAVGAAIAERFMAARFGEWCGHKIYAFISDGGIQEEISQGAGRLAGFLGLHNLIMFYDSNDVQLSTDTDAVTDEDTAAKYRSWNWNVVEIDGTDPVAIRDALALANRETERPTLIIGKTIMGRGCVTVTGEKFEGKYSTHGQPLSKSGASYEKTIENLGGNVENPFVIFPETSGLYARRAEELKAIVAERKSAQAAWEKENPELARELHDFYAGKLPALDFSSIEYKPNVATRTASANVLAYLAERVKNMVVSSADLANSDKTEAFLKKTGAFAKDDFHGAFLHAGVAELTMAAIMNGILLHGGMQAACGTFFVFSDYMKPAVRMAALMELPVKYVWTHDAFRVGEDGPTHEPVEQEAQIRLMEQLKNHSGKNSVLVLRPADSAETLVSWKLAMENKDTPTALILSRQDVPDLPSASGSRYNDALQAEKGAYILMKDETPDVVLVANGSEVSTLVGAVNILHDKGVRVQIVSAPSIGLFLEQPLSYRNAVIPPGLPVFGLTAGLPSTLFPLVGSEGKVYGLDHFGYSAPYKVLDEKLGFTSDNIAREIIEFVEKMSTEQKKNYALPIIVMFALFAMISFVTGLQNPMGVIVKSQFGASNFMSQLGNAANFIAYAFMGIPAGMLLQRIGYKKTALLAVTVGFIGVGITFLSGIAESFAVYLVGAFISGFSMCMLNTVVNPMLNTLAGGGNKGNQLIQLGGSFNSISATIVPVLVGYLIGDLAQAKISNADPALFLAMGIFALAFVVLYFVNIPEPHIVKTSAKKEKSKHSALSFRHFVLGTVAIFIYVGVEVGIPNFANLFMTSPEINIDPTIAGSVVGTYWFLMMIGRLCGASIGAKVSSRAMLTVVSTVGIVLVLGAIFCADNILVNMPVFKSDISFGFAQVPVNVMLLILCGLCTSVMWGGIFNLAVEGLGKYTAAASGLFMVMVCGGGILPLIQGGVADFAGFLNSYWVIALGLAYILFYAAIGSKNVNTDIPTDDYEAMSDIARHIERIRQELPAGTRLVAVSKFHTAETIMEAYEAGQRIFGESRVQELVEKYEVLPKDIEWHFIGHLQTNKVKYIVPFITLIHSVDSEKLLSVIESEAVKCGRVVDCLLEIHVAQEDSKYGFTPDSCRELLQGGSSEKYPHVRICGLMGMATQTDDEDCIEREFSALKKLFDEVKGSSSVDSSAFCELSMGMSHDYPLALRHGSTLVRIGTSIFGERVYSCFMLENGMQKKVTEPYLVDALSFTEAEARIIEEVSPFISGEFSVSAVKRANFSELFFDETGDRWYKCKLNFITLDEKSGMEKRTASYMLVQAADFETALKNLVEGMKGTMADWVIVSITETPLMDVYPFDPERKTKEEDRPQEMREAIKLSLDNIDHDGGPFGAVIVKDGKIIARGANRVTASVDPTAHAEVNAIREAARVLGTFDLSGCEIYTSCEPCPMCLGAIYWAHLDKVYYGNTKADAKEIGFDDSFIYDELALPLEKRHLNVVPMMRGEAIKAFEKWENKSDKIEYMEIKNARFVISSSHVKDCPSHGLPEYAFIGRSNVGKSSLINMLTCKKGLAMTSSTPGKTMLINHFFVDDSWYLVDLPGYGYARRDKESREALREMIEGYVLYRKEMTCLFVLLDCRHKPQKIDLEFMEWLGENSVPFAIVFTKTDKIGPIVLKEHIEYYKQVLHESWEELPPIFATSSEKKRGREELLDYIDRVNKSLKEAMDQQYSSILLENAVNEFAKLPGIGRKTALRLVLHLLRQEEGEAEKFGNTIIKLCKEIKRCHICHNISDSDTCTICGDPSRDASTLCVVENVKEVMVVENTRQFHGLYHVLGGVISPMDGIGPADLEIESLVDRVASGGIKEVILALSATMEGDTTNFYIFRKLAPFDVKITIIARGVSIGGELEYTDEITLGRSILNRTLFSESFKGMEVEIFVVDNHSQDDSLDYLIPRFPEVRFIANTENVGFARANNQAIEQSTGKYVLLLNPDTVIAENTLFEVFQFMEAHPEAGGTGVKMLDGDGRFLPESKRGFPTPWVSFCKIFGLSALFPHSRIFGRYHMKYLSPDECHPIDILSGAFMFMRRETLDKSGLLDESFFMYGEDIDLSYRLVLAGYTNYFLPTPIIHYKGESTKKGSLRYVRVFYEAMLIFFKKHYPHYSKGYYLAVKFSIFFRASLAAAYRAVSFPFHKHGKTDKKEKGKWYILSRTPQTIARLIPGIKHYTPIWSADEIPSSSERQDDRHIILDSGLLSYREIIETIQSKSDVRNHFLIYTPDSEIIISPQQTYTKPMNYLTGKQIELRAVEPEDLDALYRWENDSSLWIYGSTVSPFSRYLLKQYIENYTADITRDKQLRLIIMRKESRQVIGAIDCFDYDTTNRKAAIGLLIDPGHKRQGFGRDALETFVEYAFRFLHLHQLYVHIPVCNTASIALFRTCGFHESTRLKDWIRLPQGYADALIFQKFNREMHVESFHIRRRVMPPHRGALLVAEPFLDEGCFRRAVICLAEYSEKGAVGFVLNSPTRYVLSELLEGENDIPSIPVFCGGPVGTDHLFFLHDIASLPGAVEVSTGLFANGDFDMLLDFLRSDSTVQKHVKFLIGYSGWSAGQLDGELKQESWAVTTMSSPGDCLAAEGDAFWREIVKGMGDGYKLWLNSPQEPSLNMTQSKRYEITPKRLTFVQQHYTIMDGKDDISNVIREKKAARVTWVGFFTNLILSAAKIIAGIWGRSSAMIADGIHSLSDFITDFIVIIFIKISSKNEDSDHPYGHGKFETFATMLISFALFVVAIGIFYSGSIKIYEVLNGEIIERPTYLALAMAAVSIIVKESLYWYTITIGRNIDSPAVIANGWHHRSDAFSSIGTLIGISGAMFLGERWRVLDPITSLVVGIFIFGVAYKLARPSIQELLEMSLPEEVEQNIAEKIQQTPGVIAFHHLRTRKNGNTFIIDMHIKVDPDSSIVKAHDIATQVEESLKTTFGKRTQVNIHIEPYLQKNMSERETLIRVFIHRVNCIYEDSILSYTNPVVSFVFFLFVFSFLLLGFILDMLVVEYGHLAVTKRKASEEWLHAFSIFKPIEKNYKILIFLKEIIMKNLLTVVMLFVFSTALYAQKDVTKFLGIPVDGTKTAMIQKLKAKGFTPSTWDKNILEGEFNGFDVNVHIVTNNNKVWRIMLADKITQDETGIKIRFNELCRQFENNKKYKSMTDKEQTIPDDEDLSYEMTVNNKRYDAGFYQISPLDTIAIYNESKQSLLDKYTQEQLDNPTEEISTAIQLNYLNNKLDIELQNIFAMTNNFVWFMITEHAGKYYITMFYDNEYNHADGEDLMNIFQKSISLFIAVMTVFAAQAKNYEVASPSGDLRVVVSVTNSGTTLSVFAGETEVLAPSPISLTIKENNESRTKVLWGMNSKQPKVRRSFVDEMIPAPVYKRFQVKDRYNQMVLTSGKQGLVVRAYDDGIAYRLTYKSNIPYTVYNEQVDFTFSADYPMYASYVKRGDDGDFESQYINSFENTYEHESITKFKSSRLLFLPVLVELPHGMKVCITEADLDNYPGMYLVGGGDTPVLTSHFAPVPKTTVQGGHNMLQKFVTSREEYIARDANAQLPWRVIAVAGNDAELAASDIVFRLGKPLRIADTSWIKPGKVAWDWWNAWNLYGVDFRAGINNETYKYYIDFAAENGIEYVILDEGWAVNKKADLMQVVPEIDLPELVTYADGKNVGLILWAGYWAFHRDMENVVKHYADMGIKGFKVDFMDRDDQEMVRFINEASELCARYNMLVDFHGMYKPTGAQRTWPNVINYEGVNGLEQLKWSPKGYDQVTYDVQIPFIRQFAGPMDYTQGAMRNAIKKNYNPVNSEPMSQGTRCRQLATYVIFDSPLNMLCDNPSNYKREPECTAFIARIPTVWDETLGLDGKVGEYITMARRSGDEWYVGGLTNWDKRDIIVDLSFLGEGFYEIELFKDGINADRAACDYKRVVMPVPEDRQLKVTLFPGGGFAGRIERRMDERNLINGSLVSYLSWAADFISPIRWFLLAAFALVLADLKFGIEAARHRGETIRKSRAIRRSANKIIDYLCWILVATSFGEAFGTPFGIPILPALVLLVVYGCEINSCFNNYFEARGSKLRINIFKWLKNKSDIMVPSDDENDTTKTMNILDLSEQEIIRRNSLDEMRKLGIEPYPAAEYPVNAYSQEIKNNFVDGAETPRQVAIAGRIMSRRIMGKASFIELKDSEGRIQVYISRDDLCPGEDKELYNTVFKKLLDIGDFIGIRGFVFRTQMGEITVHAQELTVLAKSIRPLPIVKMKDGVAYDAFEDPELRYRQRYVDLVVNEGVKDIFIKRNKVYTSMREYFNSRGYLEVETPILQSIPGGAAARPFITHHNALDIPLYLRIADELYLKRLIVGGFEGVYEFSKNFRNEGMDRTHNPEFTCMEIYVSYKDYNWMMDFTEKMLEKICLDVNGTTEVKVGENTINFKTPFKRITMLDAIKEHTGIDISGMDEAQLREVCKKIGVEVDETMGKGKIIDEIFGEKCEGHYTQPTFITDYPIEMSPLTKRHRNNPELTERFELMVNGKELCNAYSELNDPIDQRLRFEEQLRLSEKGDDEAMFIDNDFIRALEYGMPPTSGMGIGMDRLVMLMTGQTTIQEVLLFPQMRPEKVQKRDNEAAYTTINIPAEWVAPIQKAGYLTVADVAEANPNKMHQEICGINKKYKLELANPTIDDVKEWVENAKRMPIPGKIAIMGGGSWATALAKLALNNADNILWYMRRDDRIADFKQTGHNPVYLSDVTFDTSRIHFSSDINEIADAADTLLLVTPSPYMKSHLKKLSADISKKFVVTAIKGIVPDENMIVTEYLQNFYHVPESHLAVIGGPCHAEEVALERLSYLTIGCNDLQKARSFADILASPKLKTIISSDVKGIEYSAVLKNVYAIAAGICHGMKSGDNFQAMLVSNALNEMDRFLQAVSPCRDRNISDSVYLGDLLVTAYSRFSRNHNFGSMIGRGYSVSAAKMEMEMIAEGYFGTKCIYEINERYKVNMPILQCVYDILYKKVLPRHAIESIYDTFLMKSIELNIEKALGTVSKSDVFALEDKAKSGMEMLHKGTGKGNDFLGWLHLPSEITEAHLADLETAAKQLKDRCEIVVVIGIGGSYLGAKAVIEALSDSFEFLRSEHKNPLVLFAGHNIGEDYLFELQTLLKNKSFGIVVISKSGTTTEPAIAFRLLKEQLEAQVGKDEAKHRIIAITDAKKGALRKLADTEGYKTFVIADNVGGRFSVLTPVGLLPIAIAGFDIRTLVSGAVAMEKACGEDIPFEKNPAAIYAATRNALYQSGKKIEILVNFNPKLHFFAEWWKQLYGESEGKENLGIYPASVDFTTDLHSMGQWIQEGERTIFETVLSVTKMKHTVNIPSDKDNLDGLNFLSGKRVDEVNKMAELGTQIAHVDGGVPNLKIEIPELSELYLGQLIYFFEKACGISGYILGVNPFNQPGVEAYKRNMFALLNKPGYEEESKAIQARIMRRLATLILSLWGIALSHAALEVPKALPATDITENSFTANWQSVSQASAYNLNVFAYKMEDCGTEAVKVTESFEGLVPRSSGSKQNKYIDSNLSVFPENWKIDVNTGSIRQLYTTNVAGDTTSVYSGKIALAFDATGDSIVTPVLPAPASKFSFWIKNANATGTVAVYGFDGFQWHSLGEASTISYRSGGIADFSANIPVGCIQFKMIYTDENPDLNSPTAIDEISYTYGGIVKTRDYLVENKRITETSAPVTGLKDNTDYFYTVKSTNDSETSLESNMIDVFGYAGSLSKPVLKEFTDIQGGQYTANWNTVIGSNGYVVYNVYTHIAQRDETKTILHENFDAFTGGTIDLPAEDDGTTNYDEYTTVPDWSVNFGCWTEGMLSGINIQTPVISTTNTNGCTINVRVYGAKGDKIDFNNYYSQGTPEKITKFLTQEGYNNLTIDFKHSSEQMYIELYFRQLDPIKEIYLDEFTMTQTLSKGDRFSYNYDYTLVEGRRTNSYTFTDLPKAWGDQFAFRMSAYAVVGDNLYQSQWTELTEVPIPSNIDNTHRENQEIKVISYPGNTIIRLLVPQEIIISDLQGRIVAQVQGVEGDNSISLKQGIYLLRCGNHCQKFICRMKRFCKNMAVLLLLFGFVLTARADWRLVGDTAELKIPVVLSPVGDDGKEFVYVGGLPEVLFKLTDGITEYVHECGSNNPLGDSIPLREAGEDERGLCIRYASETDVYRLTLTVDGNAKSLKAERLELPKNLYIIGGPFNREIQFWKFQDAKALEVDRTYPYIFYYKGVMRYNDEGDECGSFMFLKRLSWDDKYHPASSGDFSISGKVGQPLKMRLNGEDNKWTIPADRSGDGYYELKVDLLNLTLTVEKFEPDLVENPFPLSVFAVGAAMPCGWDNAHPMVMTPIAEGVYRWEGDVEAGDFKFLRRRGTWERCYVARTKDEPIRFGEEHDVIYEYNSFEEGNDYKFVLPKTNHCILTLDLNRMKLRVDNEETEGSGVESIKTSGELIYYSSDNTLFLRSKNNLQLQVRVFALDGCLVSEDVFIGGTDISLSRGYYIVVLHREDGTQVAEFKVFVDMIKKHVLLSILGLFIACTVGAQDNSMADEKAIVKSGNMRFTVLTPEMIRIEYSAKLQFEDRASFVVINRHLPVPNFTQEERDGYLYLTTDKLELRYKLGTYPVSNDRCNPNLQITLDVNGVEEVWYPGKQDPYNLKGTTRTLDRAEGDVREWLENGLLSRVGWAVIDEREPRKDGSLSLMFERDTNGGMDWVAQRKDTAALDMYFMGYGHDYKKALGDFTKIAGKIPLPPLYVFGYWYSKFQRYTEQDMRDIVNEIRSRDIPMDVLVIDMDWHRNGKTGSTDGTEWTGWSWNKALFPDPAGFISWLHDEQNLNTTLNLHPADGVFPKEDNYDALYADLAGRYSDIKADSLTNEDGTIRWNIENKDFYEAFFEHILRPHENIGVDFWWVDWQQWMIAQNEPNLGNTFWLNHVFFNDKKLQAKNRPFIFHRWGGLGNHRYPIGFSGDSEATFSSLAFQPYFTATASNVGYGYWSHDIGGHNQEGANDAELYLRWIQYGVFSPILRTHATAAGHIERRIWKYANFEQMRDAIYLRYALIPYIYTMARWSYDTGVGMCRPMYYDYPEADEAYRYEGQYMFGNDILVAPVTSSDKGTNVSEKDIWLPEGKWYEVMTGELIDGGSVVTRSFTREQIPYYYREGAIIPLYPRMMHLKKRPETLTLQFTPGARGEFNYYEDAGNNADYQTACTFTRITQNTEDGRTSCTIYPRTGSFDDMPEERAYRLEFLARNEAPTKVTFSDGTHAVYEYDAESKKIVISVPKRACSSAITVIIEMKRLLCKWIPVCAMGAVLCACGGGVADGDYVGAFKEYVKSELKSGTWVLSADENLSAEKVDSIQVEILHEVTVADSLRAGRQEAIDSYVSTEQRLKYEMEVAEHNYKLDENSQFARRVDYERKLKEAMRSHGNDRNYASKIEGYKQAMERLPKDHEAYVKFDKDRDFSYIREYEAAKSAYDQFVATNVDDYIQSYDLIARYVGRDTTEVLGVAAQVEFITPDGNQSAIVLFNEKPTFVKTILTDAQALEDDDTESDAIEYEAEMENIAIKNYLLQHNVPCITPKAALIDMDGVLYDSMKNHVEAWYRTLTPMGFKCSKDEFYLYEGRTGASTIKYLFDKHFGKQVSDDECAEIYKIKEKHFNALEKIVPMPGADLMLQRIIGNGIRPVLVTGSGQGSLLDRLDHDYPGVFEQQYKVTAYDVKIGKPSPEPYLMGLSKAGVKANEAIVIENAPLGVVSGTAAQIFTIAVNTGPIPAQTLIEAGADMVFPSMPDFANHVDELIHTLKITRMESQKIIFTATPGETLKNMLENFSFDTLFILCDTHTQKFALPEISKNISTQAQYITIEAGDTHKTLQTLVHVWNELSHKGASRKSLLINLGGGMVTDLGGFAAACFKRGIRFINIPTTLLGAVDAAVGGKTGINFNGLKNEIGAFRPADTVIVSTQFFQTLPQNELLSGYAEMLKHGLIDNPATYRSLLDFDLSMPDWEKLLPLLKESIQVKERIVAEDPFEKGIRKALNLGHTIGHAFESLSHKRETPIPHGFAVAWGLICELLLSHRYLKFPSETISELAAYIYRHYRAFPITCKDYETLYELMTHDKKNEAGYINFTLLQTIGKPVIDCHVDKEEIFVAFDLYRDLFKLMSVQKNFLTSEVISYTPPKLYTGKKGNDWYIGFKAFDPLAGALRLKRIKLNHIEKISERRKYAADLITRLHNQLRIGWNPWISQNGNSKGLSLFSDVCNRYRSYIDRLFSDGIIRQDTYIGYVSYLRNFLKYNDSQKPPITYIYQLSKSYISEFLDHIYIERENSPQTRNNYLTWLRVFSGWLLKHGYTEHKLTDGIDNISKRSIKKERKLIEENDLIRLLDYLNTHNRHYLLGCYLLFYCFVRPKEISLIKINDFSVKCGTLRLHADNSKNRKDAVITLPNKVLKLLVDLNVFSFPGNYYLFSNGFIPGKDFRDSKQFRDYWIRFVRKALDFPASYKFYSLKDTGVTSMLRARIDNISVRDQARHSSILITDIYTPHDIEQANPIIQKFDTVFMEQKSEIVLYQPEGAISLEVRLENETVWLTQQQISELFGTGRQAITKHLKNIFASNELDENSVCSILELTAADGKNYKTKVYNLDAILSVGYRVNSKNATLFRRWANSVLKDYMLKGYSLNHRFERLEDKIDTRFQRYDSEIQRLSNQVDFFVRHSLPPIEGIFFAGQIFDAYKFVCDLVKSARKSIVLFDNYIDESVLTLFGKREKSVSVVIYTDKITPQLELDIKRFNAQYSPVKVKLYTKAHDRFLIIDGEIYHIGASLKDLGKKLFAFSKISAIPPEIIYKQIDSMNVMRPRTDKIEISGNLLTGVFHIYIFKQDNAYIAYCPSIDLAVSGNSIQNAEESLQESMSIHLDYQIKNKVLLKDLKKHKWKVRYLIKNKKSRMRKTFLGVLVFMSQLIFAQGIEVISTKALTLDGQGVFLPKISPKGDCVLVTNEDMSGLKKFDLATGKLTTITNDRSAGFNAQFSEDGSTVIYRKSEYKGKLRYSSLNSVNLQTGKTEQLVKPTRNLEGVTVKGGTVLAVNNGKLISKRIAGKKLKNLPAIPSIKNSQLYITIDGKTKQLSPNGTNVGYLWPSVSPDGGKLLYYVIDEAKAYVCNIDGTNPVSLGTLRAPVWLGNDWVVGMVDYDNGEIVTYSQIFAVTSQGTHRTALTDQSKICMYPSASDDASKIVYTTQNGEIFLMNVATSKMKLNKLLSICLGITLAFSVSANDLSEARIYINPGHGGWGPNDRPMATINYAQMDTLGFFETNTNLIKGMALREELVKAGAGYVRMSRTVNGVVSADDEHKTENDKYIETQPGESGTQQLVTLSVICQDVEANNMDYFISIHSNAATEGSSTNYPLILYRGTDSESGNGLTNARDMARAAWPYVNKNEVTYKSYYTGENDNNSRGDISFYGSSSSNSMGYTGYLGVLKHGCDGFLCEGCFHTYQPERQRLLNKDYCKQEGMRYARAIRAWFNDDSETTGCIMGTVKDKYNTLEHDLYKYKINSIDAYAPLNNVTVILQNENGEEVGRYTTDKEYNGLFVFTDLTPGNYNLVFDIEGFWKETEPIEVIVNETAFINKRLTDLEHEEPSDEEIEEEVLDYPHPDQDGDIAAAAYYNLTKETEITDIEALNGLTVRRAILRDNKYYVLAVDENKLPKLLVLNPATGELIKEMSTEGLVTEGYNGKELPYILSDIAFTIDGVLIGTNSTVIGKEGNAYQTGDFYVYKWQGSETTSLEDSAPVVVATLQTNTSASLAAAGNNNSNYIANTIAVSGTIDDFQLYFDSHAGNAWNTAYGIRYVCWNIKNGEVAGFQKNDTDFDESQIGEKAHITLSPLAKSRLIIDGTLTAPREFLMDWMSDQGIMLADFSDNIPVESYGANYFRYADKIYMSAPICESQGDGNYSYKVRLYDITNGIDQAQNIGDTESFISTTGLSPMTSVGIVDNSDIDIYLLAGNKIVKYTTKGMEQSESPARIFAYGLSYNETEDGYTINFNLNEDATSVNLILNNPETGEAVQTIALGALPKGANQTTISRADLPAEKLNWSIQAIAGNVTKFTKISDDSPLYQYYAPYGVAIDKSPESDYFGRIYITNTAAGTVSAGNPSQAQTSTVGVYVLGADISDITQQGSTAYSGTISWSGETGMGPKKAAVASDGRVFLCDASPNNAGIYLMNPETFDISSIFTGATNSNGSLMIGGKYVCGQITAVGIRGEGATTQLYAIDKTASGSSWKKFINVYNIGESNTWTTAPNESKAASSYVGNDNSSIVPVSTGYWAAQYRGGGSNSPANPCMFYYSDQYQDAVFNTAEPNIIGESTQNGALAVNDKEQLIALSVNGGVAVYSYKMKEGIPSVTEKFRKEIAEMGGYVNDFEFDYAGNLYAVSNAGERLAVWAMPTSDNSCVTPAKKSLVLNNIYTGIENTVSISRISPNPTTGIITISAQTTIETVEIYNIAGSLVMRQAHVGTTTISLDLSDLADGMYFVKVNDGKAVKVIKKMIGLYILGNFVLFLGGKIMRNTNSKIFLLILLGSLTAFGPLVTDMYLPSLPSMTDYFGTQASMVQLGLTSSMIGLALGQLFFGPLSDWYGRRPPLLVAMSLFIVSTVCCIFSATIEGFIFFRLIQGIAGAGGIVVSRSIATDRFTGKELAKAMAIIGAINGIAPVASPVLGGFLTDSIGWKGIFIVLLILGVLLLFSNLHFKESLSVDNRKRGNLKSLVSGFGIVLKNRRYVYYVLQMGFAMGVLFANISSSPFIVQQHYGFSAFEFSLFFGINALAIGLAAGLSVKFKNPEHAMFLGSVGMTMMSAVEFVILSNEYHFAVYEAVLFVLLFSMGLTFTASTTLAMDCERANSGTASALFGAAGFAFGGIVSPLVGLGDILSTTGLIFFVCSVCSLCFSVLAMNQTHTNLWGSFKCKMGPVTRFVFLRREKMSLKLLDMKKIIGLFIFMGLLSATSVQAQNYNTKCLGISAGYMFDTENVQAGVFMHLPFAKNWRVVPSVNYTFSHHDLNEWEINGNIHYLIPFAGRFSVYPLAGIAFQSWRGNALQNDKELSNTRNKFGINAGAGFEMSISRHLNLHIEGKYIFINDFNQANISIGLGYKFMSLSPSRRFHVVSLQVPFPPDYGGVIDIYYKLKALKKMGYETWLHTFQYDRSRAEQLNEVAARVSYYPRHRSVIRQLSHIPYIVSSRHCSKLLDDLLSDNAPILFEGLHCCAFLSDKRLKDRIKLVRTHNIEHEYYKELSRKTSGWKKLYYELEAVKLAKYEKILLHADAILAISESDRCYFSSRYPQIPVSLLPAFHAYAEVAPAGPKENYILYHGNLSVEENIEAAEYLLRQVAPLTQGTSWIFAGKNPPETLVRLVERTPGAQLIANPSEEQMNQLIEKAAANLLVTFQPTGLKLKLLNALFHGGHCIVNSKMLFGTGLDKACLIADTPQAMARAVETALNEPFDQAKRTERIQLLKAYDNEKNIHILSDLLEEKLRMLRNTAREEGVGVQHFGFTVYFHSFFFLRVLSLSAGRGLKCYFMAGCFCNAKYRGGVRRTEGLKKKTKKYGYSTFTGKSKALINPIMNSLKFQDRLLGLQDNLLNFAYMLTANREEAKDLLQDTTLKALDNEDKYIDNVNFKGWVFTIMRNIFINNYRRVVRNQTIIDQTEDLYHLNLPQDSGFASPEGSFTVKEITTAINSFSEEYRIPFSMHVAGYKYHEIAEKMDLPLGTVKSRIFFARQRLQEMLKDYKMKKFHKYIFFLILFFQYFVSNSQSTVYQIDIIKEIGSTTWRYLRAGLHQAQEQNAKAVILRLNTYGGTVVHADSMRTAILNAPIPVYAFVDNNAASAGALIAIACDSIYMRSSASMGAATVVNETGAAMPDKYQSYMRATMRATAESHGKDESGNWRRNPLIAEAMVDERVIVPNLCDSGKVLTLTANEAIAQKYCEGIVDNVDEIISQKLRYETYTLQEFKPSLFDDIAGFLTHPAFQALMVTLIFGGIFMELKTPGIGLPSAIACTAAVLYFTPLYIDGLAANWEILLFVIGIILLIFEFLVIPGFGIAGISGSILILGALILALVGNVNFDFDFVSAADISKGIITVISGVIISVALLFWFFQKIGSKGPLGRLALQADQATEKGYIGVPSELQEYIGKEGLAATILRPSGKITIGDRQFDAVALHGYIEKGAGIKVVKYENAQLYVIEIKMKFIGIIPARYASTRFPGKPLADMKGKYMIQRVYEQARKVLDNVCVATDDDRIFNAVESFGGNVVMTSAEHRSGTDRCFEAYNRLGGNEDVIINIQGDEPFIKPEQIESLIACFDSPQTQIATLVRPFEVTEGYEALANPNSPKVILNDKNEALYFSRSIIPYMRNISPEQWPDKHVYYKHIGMYGYRADILSQITQLPQSSLEIAESLEQLRWLQNGYTIKVGITTQETIGIDTPDDLQKALTLLMTLDRTTTPPVGTFPPLSLPAPGIHALSNDIEVIACNRGDEDVCRIDLMFEGGYYTEQKPGTAALTLLMLKEGAAGKSSEEIAESFDYHGAWLQTSASSHYLYVTLYTLNRHLDTCLSLLADIVIRPDFPEKEFTRLKERRLQQLLVQKEKVDVLASETFLSMIFGDKHPYGRAVTPDHINHITTEDLRDYHRQHIAPGRCRIFIAGKITGKLLDNLELHFVHTWNVPSVDSAIIPAFPIHRAENPIIVTHKENALQSGIRMGLPVIGRENPDFFALKLLCTILGGYFGSRLMSNIREEKGYTYGISSSIAAMRYGSYLTISTQTGTEFTRPLIDEVFVEIDRLRNEPVPTDEFITVQNYLRGDMARTLDSPFSIADYYLSLKANDLPVEYFAQQDEAIRQLSPGDLLSTAQKYLVPSQFYIAVAGDKNKIPPLSLPMINSFSSTTPPIVTRHPNATGGGVSHIEEVARSNGGVENGISSAGLYWTFNSLARWALPLYRYATQGERAKMRFKYLKLLHCRAPMRKLLCPQCKVSSMYVKNGKGERRAVYVTDGGVVVARKEGETLDGFDLETVYCMGCSWSGSPKRMVKMMISQKLQEAINVQIAAEMWSSNLYLSMSFYFKKLGYDGFASWMRKQSQEELEHAYNLADYVSKRGGVAKVDKIDVVPQEWESVLDAFENVYKHECHVSSLIDELVNVASSEKDKASQDFLWGYVREQVEEEATALGIVEKLKRCKDEASILYMDEKLGERMKQKYPIKLRGTAMEEFKIFEATLLNLFPCAAQRYRGSAHRARGLVLQKNPMCFFFNPSLRRCRSSVSPLYCCAIQGRRGEYSQRTEKIKRPFKATHLILSLCIATIDIGGSARRAKGLKQNLQESQMARSDGGVENSLSSADLYWTFTPFSYPLKEHFRLKYSGLWEKTKKESIGEKTKSTCDQTATDAYTMIREVKFESQDRRIKQILAALNANGIKDIEEANAICESYGLDPYKTCEETQPICFENAKWAYVVGAAIALKKGCKNAADAAEAIGIGLQSFCIPGSVADDRKVGLGHGNLAARLLREETKCFAFLAGHESFAAAEGAIKIAAKADKVRKEPLRCILNGLGKDAAQIISRINGFTYVQTQFDYYTGELKVVREIAYSKGERAKVKCYGADDVREGVAIMWHEGVDVSITGNSTNPTRFQHPVAGTYKKECVEKGKKYFSVASGGGTGRTLHPDNMAAGPASYGMTDTMGRMHSDAQFAGSSSVPAHVEMMGFLGIGNNPMVGCTVACAVDVAQALSKMVYSHEVEHMCVVKKGPNHGPAPIPEEGKWVKAKEVIDISGLTHGIGWCAPQQGACKLTLNVKNGVIQEALVETIGCSGMTHSAAMASEILPGKTILEALNTDLVCDAINTAMRELFLQIVYGRTQSAFSEGGLMIGAGLEDLGKGLRSQVGTLYGTLAKGPRYLEMAEGYIKTLALDENDEICGYEFVHMGKFMDEIKKGTDANEALKKVTGTYGRFTKEAGAVKYIDPRHEMEKVLRDYRSRLQANSRETERIKMYIRIIAFLRLSVVVVAALIVYLFRNEGVEVWGTTVLIGIVLFLSLARVHDRWFRKKEFVDCRDRIIHRELSLLEYRFDGIDGGSEFIDPSHDYSFDLDLFGERSFFSYINRTATAVGRVALSRELLHPDLKTASIRERQEAVEEMSCHTDFRIDFQSYGGCSGESRVDTEAIERLAGMPRFGTGRIVCWLVYAVPAVYLALFALWLTGMVAGNVIVAVFILLLVLSGLFAKRVTRIQEQLNRTLQSLSRYSRLFEMMERMRFRCKPLSELQSRCVDSDGSVSQRVSRLRHLLSNLDQRYNFVGFALLNGFLLWDLRQINALDRWLCDNCEKITQWIDVLSRFDVYVSLGTFRYNYPDYVFPDIREDRTPVMQAEALGHPLIPREKRVCNDVAPMNEASFQIITGANMAGKSTFLRTIGINYLLGCMGAPVCADSMTFTPLPLFTGLRASDSLADNESYFFAELKRLQQIVLRLRRGEKLFIILDEILRGTNSVDKQTGSLALIRQLVGAGATGIIATHDLALGKLADSLPGKVSNYRFEAAIQGDELTFSYRLQPGIAENMNACFLMKKMGIIPSDYSENNMKDFFRHPVIGIDRILSSGIKWQLLFLLGVIVAAILLFIVIEWLTGSILTIKENDPRNIFVDVYYHFADPGNQYVVEGTWNRFLAFLISITGSALMGGLLISIFSNIIDRRVERAREGQIGYKFRNHYVIIGFDKMAIGLIKQLYQKSVAEQSDHTPYLFVIQTSGSVDSARHELLSKLDASIDRRTIILHGGRDSREDLEKLHLLDCKEIFLLGEENETDHDSINIECAALINRILREKNATGKEPRDIEELRMLVAQIQSRCKKCNVLFEAQSTFAVFQRYDIESIFQLPKKTEKQWLVHFQKKYKDGAENEKLLKLTQTFDRLSERLIDFLPFNFYETWAEKVLVRGLYTPHDKGSEVIRYVPIDGDGIGYDSNRYVHLVIVGMTSMGIAMGVKAAHIAHYPNFLRDRSKRTRISFIDMNADTEFDRLRGRYDSLFDMCDYRVIDTVEPAKSYANPNTDDKFTDIEFEFIKGSVESRPIQELLQHWAEEEDGRLLTIAICFEIPQKSIATALYMPRLVYEKAHSILVRQNVSCSTIELIRKAHQYGKLRAFGMLDECYDIDDDCMKRVRRINFIYHKITPEQPFPQTLDDIEARALWEELSTVHRWSNVYNAHSVPSKRRSFGKSEPENLDEDTALIEMMAEVEHNRWNMEKLIMGYRPTTPGEDEEIQRLGKERKRKIERESFAHTYIKPYEALSESVKDYDRLIMKYLWRVMKREKYIPAPTDTSREKLPEELMELVEVMAKNVHEVWSQSRLSEGWTYGARRDDEKKTHPCLVPYEELPEIEKDYDRNTAIGTLKLIQALGFDIVKKRMNPFQPLIFVYLGIMRKMGRYKFSPDSLANFITFYKFAYCHINLVSISMGLFDLFKKDRGYEIHSLEFCEVGKDGKRDTRPSSKHYTDSRYIMPVVKMTSRIDRTVKIKVRITEPSGKTHTYDFDAPLKSVENMSAQFPWWGSEKRDHFTAVGTWRFDILDEEDHVVISAPLEIAPLEDIWESNGWIYIVSHFEFRNVNGKGEVIDDWNTGNFVEPKYMQMRCRCTCYSDVVRKVTYHVEIKNERTGKIKAFDHTVTLNPRDGSQWLQICGWGSDSGTSYAPGTHTYTLYYKNREMGRGRFEVVKSPKQRGWIEPLALVLHFYNTDEELQQWVTYDCALHIYEGKVIEQKSFKANTCKKLVAGFQWLSLEKGHSLKLIFKFYMEGNLVYTSVQDAVTNESDSKDVFQQDFEVSSSMRLEGPNGITSPFPAGRYEVELYLKTEELDEHFVMRRTLDVRMSNNIENLFTQYYQILRAYALRYVQNQDAAEDIVQDVFFELWLRRNEIDFDLPMKAYLFKSVLNKSRNYIYDKRVKDKISFDSDNDIQFIDDYLQSFVVYQEDSLLLKDLDREIKTYVESLPEQCHRIFIMSRSLNLKNKDIALRLGISIKTVEKQITKALSGLRSHLKKNGLLSFFFLLFSGFEMDGQNEIKEIDRLILKYLEGEASKDEKIALYRWIELSEENKTHFKEAQELWLSTQAILAPKEDTEKALQRFRSKIKNYNRRSKTFRKPLYYITQCAAIIVILLGLYYFFTRESNPEQCTCVEMAIGNKGCITLPDSTVVWLNSGSKLTYPSRFSDKKRKVRLNGQAYFKVFHKEDQPFVVETNDMDIKVLGTSFVVKNYIRDEIIETALVDGHVEVYFPNSSVPPITLQPAEQVTYSRKTKETKIYTRKDSSLYHIWAQEKLLLSNCELTEVIEKLGAWYNVTMTCTNTSPTPVYMTLTVRTEPLKEILQTLKSIAPIDYRFNNDTVYIEHKPNSMPTLVCDNYRVEHMEKHNRHIDELITKYLDKSLTREECAELRRYLAEDKKHLAYFAEIRDLWLYNTALWQPVISTRSALEKLKKRIRKYTSLVKIRRTVYYASQIAAVIAIAFIFHTVKESNVYSATTHTVLTSTHKSEVTLPDGTIVWLNNNTKLIYPEAFSSTERSVYLEGEAYFKVTKNKARPFVVKSQGQEIKVLGTSFNVRNRPNEDLAETTLISGAVSLCFNNDSVPVRLNPNEQITYSKSNQSIRKDTVVAHEYIAWATEKMTFDNDRFTDVISYLEDKYQLQIICPEEIADTLYLTLVVRNETKEEIFKEIACISHLQYSIHNDTVYFDFPENTDCQTLQHSLMKTLKHKKTITKRSSFPYKVIGLVLYLLWVQPFGANHLYASERKINIEVNDVTLIDVLKQIEAQSDYVFFYNNADIDTEKKISINMKDANIKDVLDKILNEYSYRINNKKIIITAKRQAPVRTNKISGVVSDDSGQPIIGGNVLVKGLNKGTMTNIDGKYTIDVPDSATTLVISYIGYKKQEVEIGDRNYIPVTLQKNDVLMDEVVVIGYGTVKKSDLTGAVSSVKTENLPIAANTSVTHMLAGQAAGVMVKQNSAQPGGGIEIYVRGAASTGAGNDPLYVIDGFPVTNKSVEPESGNRYEYGSRNPMNSLNPNDIESIEILKDASATAIYGARAANGVILVTTKRGKSGKPIVKYNANYSIQTIAKRLEMLSAKEFMNVSNEISYQKWRMDNELYPYGGELEEDALPYKGNPYSPEEIAAAGEGTDWFGLLTRDGSINQHNVSVSAGTESTRFLASLNYYKQKGVIKNSDFQRISGRINLDQDLGKYVKAGINATYSTIFNNNVPLGEGNAENSSLLNSALHYDPLVPVKDESGNYALSPTLGMIPNPVSMLEITDQTQTDRLLANGYIEATFWKDLKVKLNMGIDKNQGRRSTYLPKSTLYGKQEGGKANINENRTVDLLFELTANYTKQLFKERDRLEVLLGYSYQQENWDGLGAGSSQFFTDLFLWNKLEAGNVARPPVSSSKGKNELGSYFGRINYSLLDKYLFTFSLRYDGSSKFGKNNKWGLFPSGAFAWKMQNENFLKDVDWLSELKLRVSFGQTGNSNIGGNAYEYYEAGNQYVFGDAVQTGSIKSQLENPDLKWETTTELNVGLDFGFLNNRITGSFEYFHKVVSDLLAFRKLNSLMEVSTIADNIGATQSTGYEFSLNTVNLTGPFKWNTTLNISSYNDRWKERNPDVVLAPYEKEDAPIRAIYGCVSDGILQIGETPPASMPDLLPGQMKVKDLNGFDPNDGSKLLGHPDGKIDAADRIYLGSTDPKVIIGFGNMFEYKNFDLNIFFYGMFGQYVANSNRAKYGPSGCEYILQRQNYSKEVLERWTPDNPTNKFPSGFYSAYYGGDDWLLEKVSFVRCKNITLGYSFPHKWIHKVFSQARIYVDVENPFIITNYQGLDPEMDSKGGYPSQRTYSIGIDITFMKTKFKHILVILCLSMISCEGNLEPELFDQITPENFLTNEDDVKTAVTGVYAEFRGISEWGRYKTSWGSVMTLQEVPTDLWAANWFYKAHTDFMWKATDYFVCEIFEFFVPAITKATALIARIQDAPVSDDIKNRYIAELRVVRALWMYDLFDLYGPVPAITDPEKILNPTQDFTVTRPSREEYITFVETELKEVINAKILPVAWTGSDYGHVSQATAMMVLLQLYMHEGGYCRNKHVGDYLDYFKKAEQVAKDIMDLQYYELQAEFKDIWSPQNQHNNEIIFALPSFPIPVMGNNFLAHVLPTDYKSQQGIPLTGWNGFRTPWEVYDSFDPADKRRQVHKTEYWNGKEMVTGRTGTLEYGALPMKYQENANTDGTNDASEYVIYRYADVIMLRAEAKNEIFGPDGGGTPTAKELLHQVCRRSFDNYDQTDHKKKIDQITDIDAFRAHLLQERAWEFIWEGKRRSDMIRHGVFISNAISRGKNLAKDYHELYPIPQQTIYELKIKQNDGYMMATNQRNLLKKATFWSLCCLLFSGPISAQKVYPAYGLNDFVETADPETYDSKQWDDLSSGLHAAWGSIDTLYKKGNVPANKIKQTKAVVWKGEKVNFIALAYTKNEIKDVKCVTSDLKGISSIIPAGNVKSNFVRYTLSDKFKISDEILACAARTPHKTENSHLVPDVLDYIPQMTIPGRTTRPIWITVEIPRDIPSGEYTGEIFIRSAAGEDQILSLTVEVLDHIVPAPKNWQFHLDLWQNCVSVKRYHKPTLWSDEHFEILAEYFKILADAGQKVCTAVINHGGQSFDDWYESMILWTKKADGTWFYDYTVFDKFVNMMASIGIDQQINCYSMYPWGATRYFDEKSGDWISIQPEPGTQEFADFWRPFLLDFREHLKENGWFEKTAIAMDEKLEPIMTGVISFIKETTPDFKIALAGGYIPSLQEDIYDLSIFVGHPTTSENMQARIAQGKPTTFYTSCSWPEHPNQFTFSPPAESALVGWFAYAQGYTGFLRWAYNIWVQNVLKDTRCASAPAGDQHMVYPGPRNSVRMARLREGIQDYEKLRVIMERLKGLGTPEANENIQKLQRVLQTFSLGEISKETDNRITSLVNDAKAVLTEVAKATPVNMSNLVIPSKDRNTIEIYPNPTDDKLFISYDGDTEKISYQICSTSGQVLQTSNTKPVYKYINIKNIPSGNYIIKFNVGSQVISKKFIKNMKPKKITSCMLFAMIFSCGMSLQAANIKAVNFIHDNSIRGCDIHLSQEGNKYFADVYNQQQTIEMWVRISETLDAQGGVLISTKSAFVDDPANDNKSGGYELMLQPNGWARATFCVGNGGNEPKWVNTQLQAGEWAKLSMVIDGNKLICYKNGEKTVEETFSAPIAVGTGDLTLGANPNWVDGEKFQGMITDVRIWTVARTEEEIKSDLNYYFASKKENLFLNWNMQEGEGTTLKNLMHSSRNQASIVLINDMDETGIEWVDNSGCPIYEEGSSSIETARQKQAAYISGDNILIDGENINGAALYTIDGRLVMSISSHHNTIDISDLTPGYYIFKAIIDNNPVSLKLRKMKKYLSLLIAILFTLSLNAGGGKAKIVFDSTRYDFGYIQEDKGKVTHSFKFTNDGDAPLIIIYTRSTCGCTASHFTKEPVAPAGTGSIDVTFDPEGRPGTFRKEVKVYTNARKASIKLIIEGIVVPKKMKQLILELILIFSITVSVAQPQIVFDNKNHDFGTFEEETGPVTHDFRFVNSGNEPLVLQNVRSTCGCTVPKYTREPIAPGDSGSIKVTYNPKGRPGKFSKPIYITTNASGDRETLHIKGVVIGSKSRRATNPYKIGTLSLRSLHIPLFDTPKGHVKEGHLFVRNEGKTELVPTFKNVPSHISVEMIPAVLHPDEEGLIKIYYDPDVVDDWGFRRDEFDLGLDNGSSNDFNTVTVSANLLDDFSTLSPEQRQNAGHIELSSNVIDFGIIKGNTAKKQTLKITNTGKSRLTIHKVANENRSLNIKLKRNTLNPGKTTELVIEADPSMARNNLLNSRLMVITDDPERPSVPIRVLGSFEMDHPENDAQYAGLAVNKGIEQPPIVNPYLKKMRTAKRRSFTASEYVEGIVKGDTSILSQAVTLVESNLYEHQTLAQEVIEKCLPHACDSVRVGITGVPGAGKSTSIDTFGLHVLKRGGKLAVLAIDPSSERSKGSILGDKTRMEKLSIHPNAFIRPSPSAGSLGGVARKTRETIVLCEAAGYNNIFVETVGVGQSETAVHSMVDFFLLIQLAGTGDELQGIKRGIMEMADGIVINKADGSNIEKAKLAQAQFRNALHLFPPTPSGWTPQVLTYSGYYELGIAEVWDMIDKYIAFVKKNGYFDYKRQEQAKYWMFETINEQLRDHFYRNPQIERMLEEKQQKVLNNEQSSFMAAKDVLDYYFDKEKMKQVICPKCGKTFSFDESRYDVSCNISFICPACRKRFLMTLPEIDACHKNDIDTSLGFITVLENAFGYRQEFPLHAGDNIIGRASKGTEVDISIETSDMSMDRRHCIINVKEKGNRPILTVRDNPSLTGTFLRHELLSDRERAVLHDGDVVTIGATTFIVHIPDEEDEEYFEMIKRIALLTLLVAPLWLSAQVRTEKLLEKGWKFTREDNPEFKTSQFDDTKWQSVCIPHDWAIYGPFSINNDKQNTAIVQDGQKEAMEHAGRTGGLPFVGTGWYRLRFDVPEYTDGKKCTLVFDGAMSHARVYINGKEAGYWPNGYNAFSVNASPFLKQGESNTLAVRLENFTESSRWYPGAGLYRNVHLIVTDDAHVPVWGTQIITTALTDKYAKVKQTTSWNYPSGKSLSDYVIVTDLVDHNGKIVATNRKQGSDFDNDLFEQEFVIENPAAWTPETPDLYTSISKIYEGDVLKDQYSTTFGIRTVEVRQGEGFFLNGKRVQFKGVCNHHDLGPLGGIANEAGIRRQIRMLKDMGCNAIRTSHNMPAPELIKACDEMGMMVMAESFDEWATAKVQNGYHTVFGEWAEKDIVNLVRHFRNNPSVVMWCIGNEVPDQWAGDKGPKLSLWLQNICHREDPTRPVTQGMDAPDAVVNNNMAAVMDVPGFNYRPFKYIENYKKLPQEIILGSETASTISSRGVYKFPVVRRSMPKYPDHQSSSYDVEHCGWSNLPEDDFIQHEDLPYCIGEFVWTGFDYLGEPTPYYSDWPSHSSLFGIIDLAGIPKDRYYLYRSHWNKDVETLHILPHWNWEGREGEVTPVFVYTNYPTAELFINGKSQGKRTKDLSVTVHNSGDSLSTANFKRQKRYRLMWMDTKYEPGTVKVIAYDKDGNAVAEKEMKTAGKPYRIELTADRDKIMADGKDLSFVTVKVVDKDGNLCPTAANEITFKVKGKGYYRAGANGDPTSLESFQAPHMKVFSGMMTAIVSSTEEPGKITLEATSKGLKKATLVIESGKMFIPDTPDSANHQFFNISPLTDTLPIIHSHIEAMVYLFPNPSVTPMKKSALQTARASYQPKLPEAIKNGVTIVEGKATQSVADQEAIAKLFPNTYGMPVLRFEAAAKKEYPAINVGVILSGGQAPGGHNVISGLFDGLKALNKESRLFGFLLGPGGLIEHKYMELTADIIDDYRNTGGFDIIGSGRTKLETKDQFDSGLEIIKELGIKAVVIIGGDDSNTNACVLAEYYKQIGAGVQVIGCPKTIDGDLKNEMIESSFGFDTACKVYSEVIGNIQRDCNSAKKYWHFIKLMGRSASHIALECALQTQPNICLISEEIEAKQMTLDDVVNYIAEIVAARAAKGNNFGTVLIPEGLIEFIPAMKRLIAELNDYLAANGSEFAMIKKSEQINYIIKHLSPENSAIYASLPEGVARQLTLDRDPHGNVQVSLIETEKLLGEMVGRRLAEMKAEGKFVGKFATQFHFFGYEGRCADPSNFDADYCYSLGYTAALLVGEGKTGYMSSVRNTTKPASEWIAGGVPVTMMMNMERRHGEMKPVIQKALVRLDGAPFKYFASHRDEWAMNTCYVYPGPIQYFGPTEVCDQPTKTLMLEQNGTIMKRGVMFIDRFVRYDFNISVFGSLKKKYEICKSERNIKLTMQMWLDKFSARVFSWNREGQYLLFYLLTVCCFMFPIEYLHIGLKYSTIFDLRILLPQGKPVGDTLSAFAPTVGDAFLLSLPLFFFTNKRWVVFIPLFLFDVFCLIQTLYARVYEDIMPYSSFLLVNNVNDVLLNSVRGLIRLRDIFVFFPTLLLLAGYIFYFRKQRHYPSSRTRAVAAFVSLSIALSSYAVRAHHIYHRAPSDQESPWTAFITPYNYREYVVFNGVVPYTCYAFVSSLLQGGELNAEERKTVESYLDDMPRYGDNRYAVEPGRNLILIVVESMNSWLLNRTVNGVEIMPRLNRLLVEEGTFSALHLLPQVKDGRSSDGHLIFNTGLLPAKVGATAVLYGENTYPALGHALRDKGYRTLNIVCDRAQDWNQAETSPAYGFETLYDKTSFGASETLSDSVLFAESLSILKRTQEPFFSQIVTISTHAPNKAPSNPTALSRYPTESSELVNTMEAFHSLDRQLGSFLDSLKACGLYERSVIAIVSDHDELGKNVLDGREHRTLADREVALVLLNTPYTISYEETAGQIDVYPTLLDVMGCNEYGWKGLGYSLFRTPVESAVYWDGSSLGNRRSPLYSRQTQAWDISRLMITGDFFSGKSFGYDEEMIGKSLDIGSSVIRFFSKNFYTLILFALVLISAFSSIWLFYFEIVKDTNPLSSIPAHIVKTLFDAMVLMSPFFVVKRRGFVFIPLILLDVFCLSAVWYYRNYLDIIPFSSFLLYENLTPLLLESAFASARWIDCLAIVPTLMTGVLYKFVLQKKVQKERRRLWWPVIVILSVFVCFHIFLSVRDIKSKQYDSLTDRFVTFPNNILYFDLNGMCGYILYHAATSLLPQPELTEEETIRIQNYLDAYPRYADNIYSVNENKNLILIIVESLNSWVIGKSFCGEEITPCLNRIVNDSNSITAVHVLPQVKDGRSSDGQFMFNTGLLPLKSGAVATRYDDVDYYSIAKALKRRNYTAVNMTVDGNNYWNQAEISVAYGYDQNIDRLGGGTSVTDSVLMERAIEKIKVQKTPFFYQLITGTSHKPYNEPYRKTKLSGATEFPEEVRNYMEVIHYTDRCIGAFVDSLRSNGLYDNTVIAIASDHNQLLSPCGVPGYNDTEAAFIVANADVKYTHTSVMGQIDIYPTLLDVMNCNDYAWKGLGYSILRTPVGSAAGWNGTVYGNEGDSLASRQIEAWDISEKIITKGYFSIKMSFNKCFIESGLKEIEQMRLFRLIKRIIFANPFREADKYFVLKMKKRYILLVPVGGLANRMKAIDSAIKLSRKTNSELHIIWFKDRGLNCRFDQLFEPIDLPNVKVTEATWSDYLLYDRPRQKNIFIPRLFQKATFDNCIYEKQALHLFYENFDFYDWAKNRKVYIASFVYFYSPEDENDRFSVFRPLASILQEIDTRCSLFGTNTVGVHIRRTDNALSIAQSPTRLFIERMKKEIEQNGDTTFYLASDSEEDKRSIVNRFGNRVFTSVHKADRNSLEGMQEALIELYLLSRTRHVLGSVHSSFSETAAQIGKISYELLRDVRPDKMKVSVDELVDRVKANMEELTDSFDSDIVMTAGIGVERYIREKMPDALLAVWATEPVSSLPLTDCASLLRPQRSSDGSGYVLLPDDVWRMAEFCMDGWRQPVTEFIDKTSPEYELQFNFYTRGGCSTPVCVLSNEEGQKRIDYYSLPVHVVSHRVRSARYAAYPARDAESYELLPSLIPVVCYTCAALVYEILCRPEQAAAMMRCIVRMRTTIHNHLRGQNGCLGFYYGLASLLSAYPEGGLPGEFFINGETQSIWIWDSTGRSWYDTNHAAPSPFMGIITEPATFSPAVESGVQACFIYVAGGKGAYVFPALKGSAAMTVTTDSSAIITLVWDGTAWRNYVTPLTFDDAVRPVYLYRGTWNPSFTYRCTGGVADVVYFMGKYYQVKFSVGSTTASPASSNDWEELSRFCAIADEIKLKPNGLVLLDGQQTIRVSSELSSWELCNGEISHKETGTFLSQAGELRVPIGDGEVVISPLQKGIVVYSGDGDKVFQIGLDAAGEALLKMTRPIENGSCEVSISPRQIEISRLDGTGLPVYRSLFTADGLNCALKKWTDILSEGDIYVDENNFVRQKKGAMKIYQTRLGNLSTSVDVNGVPRRVQFLASDGVNGIFSTADEQLQRAMENSRGYGRRFKLSDVAQPASEEKIYTLVPEVRSWQDARDYLRREPYGLSDEEVSSPALIEQAAERLNLIFSQLKKRNKRMFLLYSKMKREMKNFLLKWKKPLLWLTGFVLLVLCWQVWDGLFDAGLALAAIVPGMSGGKIVSNEPLTTDIVREGSPSLLRSEVDKRIVKIRPMSTPIDQLSRWNGSRKASSMIVDYYSVDVKPTKSYMKASYVAPGASTVNDSHKKATINAVDNSIFEVSETLLVQGVKGYDPDGEMSNADLVLYIAAKDEDTGALTVYPINGSKIGSVTNCVPSIPVNTPLIRMGRAATELDVQTAQFAALPIKSQNFCQIFKMQIEQSTFQKIANKEVEWDFSDAEEAAIYDMRLGMEKSFMFGVKNTIFDPRKKENVMLTGGIWWQAGNHYTYNPTVEMTQNDLIDMMRQAFTGNGGNKRKVLIGGSSFIGRINKIEMTKVVMAREDKVQWGIDFSEIKSKFGKLYVLYSEVFDDCGMSDYGFIFDPEFIQKWSHVPFDSQELDLKKSGVRNTDALVLTEASCLTLRYPAAHMRIEPVIPDEEMYEAAIKTASTGVYFAVPYMAKLIIEFMEKNYQKENRNLRKSRDLLVERILHRYPARRVDSDDDLFDALEEYDSYRNERYERLADDQSKLCKLFMSNPKMGAFISDVIGGEDALIACVRYFGKDMLDCAEDEGRMEEVRKANDEYLSRMARFSELENQMRENLKNSTRCMERFKSEKGMSDEEFEGFLDRVYHLCNHVFMGELNDEVLGLLFKGLYYDRDLSCAEREAEVRGRNERIVFEKRERNGDSLPPLRNGGSFEPDSDLSPVFGNRRRRSVWDLMAITPFKYQPMFPLGEDTTEYYLLTKDYVSVSEFEGKPILKIEKEGLTAMANAAFRDVSFMLRRSHNEQVAKILSDPEASENDKYVALTFLRNAEVAAKGVLPFCQDTGTAIIHGEKGQQVWTGYCDEEALSLGVYKTYTEENLRYSQNAPLTMYDEVNTKCNLPAQIDLEATEGMEYKFLCVTKGGGSANKTYLYQETKAILNPGTLVPFLVEKMKTLGTAACPPYHIAFVIGGTSAEKNLLTVKLASTHYYDSLPTTGNEFGRAFRDIELEKQVLEEAYRIGLGAQFGGKYLAHDVRIIRLPRHGASCPVGLGVSCSADRNIKCKINKDGIWIEKLDSHPGELIPEELRQAGEGNAVKINLNQPMSEILKELDKYPVATRLSLNGTIIVGRDIAHAKLKERLDRGEDLPQYIKDHPIYYAGPAKTPKGMACGSMGPTTAGRMDPYVDLFQSHGGSMIMLAKGNRSQAVTDACKKHGGFYLGSIGGPAAILAQNNIKSIECLEYPELGMEAIWKIEVEDFPAFILVDNKGNDFFKQIKPTCPAKKMGKIMGLSDFLGGTSQNRRENFYVFNPSPQKQLFLRCFPYIAPRHPVILRDTAGEKGYKQTDEMSFSTPPSLRATSPIFCVTKHRGGVLNVSDCETEILYKATGTWRERRFKVSLQWRYAHLSRSKCRLSHHCIRIVLVIKMLLGGGIIFSSNANKPIENIASFETCISQNVVFRSTQRLKANDGRQIYLYSSGKCELWDGDRLVVTATYRLQNGEVRLLDENGNTIYKGSYRLARDRRNISSLTLAGTTYYKMMDYKAEGIKPYDEETDKTTQVREMFDSIAPAYDTMNRTMTLGIDRWWRRVAVKMLRRYSHRRILDVATGTGDLALLLDERLHPDCVVGIDLSEGMLRIAREKVTERNAQERILFEVQDCLSMTFDDNSFDVVTVAYGVRNFEHLEDGFREMYRVLSPGGALCVIELSTPERFPFRQLYKFYTYTFIPFVGRLVSKDRRAYSYLPRSVAAVPQGEDMLAIFRRAGFGHCYCRRLTFGACTIYIGEKMKNALVKTDFKFPGQKSVYHGKVRDVYNIDDELLVMVVSDRISAFDVILPEGIPYKGQVLNQIAAKFLDATSDIVPNWKVATPDPMVTVGLRCEPFKVEMVVRGYLTGHAWREYKAGKRTLCGETMPEGMKENEKFPHPIITPTTKADEGHDEDISKAEIIARGIVSKEDYEQLEKYTLALYQRGCEMAAQKGLILVDTKYEFGKIGDKIILIDEIHTPDSSRYFYAEGYEDRLARGEEQRQLSKEFVRQWLIQNGFQGKEGQQVPEMTEEYCNSVSDRYIELYEHIVGEKFVKAEGEDVAARIEKHVTDFLNNRKKMGGNLWRKWLGESDEPGRNRVQAFVYSRLWMGVFPSFLAGFAVIFLICYWGNLPVEKSSNKALLSGLLCVVGYAIGVWAAVAPDKDDEEDEVEDSTGKASWIDKVKLAVCCLALVAIFAYPSIERVLSGERTILEGCVELTGKCLMIVCLFVPVYIRLKRKSRGSLKMIERVIILDAVDPVAFYGVNNANVQLIKNLFPKVRIAARGNVMKVIGDEKETEVFEEKIKLLEKHCAEYNQLSEEVIIDIIKGDEPQAIKPQENLIIYGVNGKPITGRTPNQKKLVEAFAKNDLTFALGPAGSGKTYVAIALAVKALKNKEVKKIILSRPAVEAGEKLGFLPGDMKDKIDPYLQPLYDALQDMIPAVKLKEYMETNVIQIAPLAFMRGRTLSDAVIILDEAQNTTTHQIKMFLTRLGMNAKMIVTGDMTQIDLPASQTSGLIQAIGILKNVEGIARVEFNKKDIVRHKLVQRIVEAYEKHDEKVRKASMSKKYEQAEKKGEEMCLTPVIRNYCFFGFFPLIPLIVATAPLFLPYILRCNTPMKKGTEQEEQGAPLAAGLHAWYAENHRVLPWRGITDAYRIWISEIILQQTRVVQGFEYYNRFISRFPDVRSLAAADDDEVMKLWQGLGYYSRARNLLTAARQVVERFGGEFPTTYEGIRSLQGIGDYTAAAIASFAYGLPHAVVDGNVYRVLSRIYGIDTPIDTTEGRKLFAALADELLDRKDPGGYNQALMEFGALYCVPRSPQCGRCIFADRCMALATHRVEELPVKQGKTVVKPRYFNYFYVRQGGDTWIRRREGRDIWRNLYELPLIETDEEQGLDDLQRSGIWAELFHGAGQVSVSSQVYSCKHVLSHRIIHARFYMVETEFAPDMTGYMKIPVERLGDYAVSRLTESFLEKLSMNYPSLFMDFIIKHASPLYTIFKWVSGRFFVRGKRGKYYRTKTYISITLIWSIGLLSPVANVYARGFTESRSRPTFVSPYYFGPNAFPIPDVLTKTSDKLKIELAGDYYWGKNYTTDIFLKTHIPLWTHRANLSLWWPVIEWYDDIKNKGKMSGDVYLSIDMQLFEERRIVPSWTLRAALKTASGGGYEIDRYYDCPGYFFDTYLGKTFQIASAVIQIFSGGGFLCWQTDNGRQNDAVQYGVLVGLRWGKFSISETFGGYSGWESNSKKYGHLAHDCPMSLKTKLSYVISNWEIGAMLQHGLSDYPYTQLRIGISYSIDILNREMGKEWRIVAFYYVCYTVSHYKTSYKGYLQMKKPGLIVQSKGKYMNTDKQRIYNGDWKTLHPYSGSAPTDLYYITLANKVLAAIRAVETSLEESDYRKIDETEQKELACILTAYFEDIISQTGIFQAFTRIHGKRFGKPLPFYTLDEDYTPGEINIEEVQFLVWHYHMQLNNLDIPYSPTLDTFAAIASDVMEIFETEYESAPENEKLLQYFRIDEKESHNLYALHARFLWLCTQSYLFFNNGFLLEDQAESLAEEAKEAGMDEQIPDMVNLLCNDFGFNHVTEFMRLTPPHWLAEVLGEASPLHASLSSMGHKYTGYFRYENADETVTRFRHIATDRIIEATNRSLIGIPRDMKDPSLILRTGFIQWNGEWWLSGQISSYEDSEDLIGQITGDDDEYNLFEPEEELPEEEQRIILTDILATTEGEDGQTLDASDTAWQALLNDEIGKDFFISQVKAGEITGLQFYNAPGRLLLDNIDFVTEYVKRMKKNISLLLTLFLCVATLSAQQVDTITIHSKMGHDLKNVIILPESYTHSDTRYPVVYLLHGCGDNYSAWLKIKPELPQIASLYNFIIVCPDGKINSWYWNSPRNKDMQFEDYISDEVIRYVDSHFRTIPDRKARAISGLSMGGHGAMWNAIRHRDVFGAVGSTSGGLDIRPFPTNWKMKDQLGEFVANKKRWDEHTVINLIPSLNDGDLAIIIDCGVDDFFLEVNRRTHQALLTRNIKHDYIERPGGHNHAYWNNSIDYQLLFFHKYFSRSQENKSKTNMILDTLFIESLSNFVHGLSTAFFLYFGINLVFFRATNRPLFILGCLFCLWGVQDLKDLLLYIDTIGDSPYYSTILLSIDMWAVPLCALFLLEILSPGFATLRRVLLFELPLVLFTVVYIMTGLFEVYMSSVVYTAVVCALVVLFIIVRVRRYNRYMRDNYSYTERINVQWLMNSMAILAVCLLSWLYVCTNVSHLGDMFYYISSTVLWAVVLYYSLRQEWIPQAQDMESEETGVSRNFVSQMGGKLEEYIREKELYLNPKLSLSDLAVEMGTNRSYLSNCLNNELGITFYDYINSFRLEKAKEILDDSGFEGCIEDVAIRSGFNSVSTFRRSFQKKYGCTPSQYRKNALGHRMSAKANGNLISDLTMPNRILYSTNIAKGEHKGKPKSHFRLGYAELHLILAANAANIEKSSWRKKSSLSFFSFNTNSIILQEAILYPTQLTAFDTIIANQYSYPIAFTSMSFSHLILSLPRLQEKWKNRINMRIISGKYGRRRFDVPTNIKARPTTDFARENIFNVLENLIDFKGIEALDLFAGTGAISFELLSRECSRVVCVEIYPTQYNFIRKVQQQLNDPNLTPIKGDVFKFVQSCRQQFDLIFADPPYDLPRLETLPQEVLSRGLLKPGGIFVLEHSKNNDFSTHPLFDQHRSYGSVNFSLFRTPIMKKLLFTLAILSGGVLSAAFAQTTSRTLPDEARNVKNDPVLVRQFLEKSRNFQKRQMSSESGFQQVRPLTRKKSDVIIDAAPSLSNLKLNGAVVYDENKDVNTFGLYSFSAQAPVTRKEVTLIPRLSASGGAIYSDGKLYVYDYAIDYGYVSSSRYAVYDAVTGAELDYKSMGYSLGPVYRNAAVSCAKDPVTGKVYCCSYGYNEKTKELCYVLSTWNLEGMSKDSIALLSKPMQVMACDSNGKLYGISASTATEGNNGGILYEINKTTGTLREIGDTQVSPKYTQSAVINTSDNTFYWFANEEDEAANLYTVDLTTGEAALVGALPYGDQVVGAYIPDPEALDGAPSGPENLSVSFENGSLSGTVSFDIPSETYDGNVLNGDVTYKVLGNGDVLATSVAAAGTKVSCPVTVPSSAIYKLEVVLSNSVGDSPKSDMTVYIGKDSPLAVNNLKVVRTGDVNTVSWNSPTGTKNGGYMNVDDLRYKIVRMPDNVQVATNHADSVFSDTFTTEELALYYYVVTPYNDGIEGEPASSNSVSVGDALLPPYSQDFTEKNSLGLFTVVDVNNDNKTWTYSNGTVRYAYHMKNNADDWLITPPLKLKKGYMYEFSFDTYVLSARSEEKMEIKMGTAATVEAMNTVIMEERTYTNTRTSPKTETFSIMPDADGTYYIGFHAVSDANKGNLTVDNIKVGEPMSIHVPGEVENLTLIPGAKGALSVTIGLTAPTKNLVGGDLTELTAVDVRRGETLVKTFESPAKGTALQFVDNGVVSGLNIYSVVARNSFGEGAVTTDTVLVGIDVPLAPQSVTFTDEGNGSGLLSWDKVPETGENGGYVNPEEVVYTVYDADSKVVADDVTGDRYELTSLNSEMPQVLSYFSVTAKNQKGESEPAQSNSRLVGPSYPAPYTESFADATITNGPWTTELLAGKSYDSDWTPRADQSQDNDGGSADFQGYAAGASTRIYSPKIDISAVDNPRLNAWILMPTGGVRVRFQISDDYADWHDVDTIEVAEEWTRVNIDLASYKSKNLRIALVGECLKDFNFAYVDHIEIRGYLDNNLQATGITGPEKVNFKEEAKYVVSVLNEGVRDASQFAVYLTDEEFNVLATKTVESLAAQSSVNVEISYTPSIEMAGSELTVYGVVGYDSDEEQDDNRTKTAVVTKVNGSSYPVATGLTGNREGAAIKLAWSAPSLSKPVAEVVTDGFEDYDPFTIDGFGAWTVADVDGGNTYVFGESQSWPNAGQPQAFMIFDMNSEHIAGLGVDERFMMDNSHGSKLAVCWSSDPQTTDLGHNDDWLISPRLADGGQTVSFQAKAYDSSFTESIEVYYSTTGNAIEDFTNNLAKVSSVPADTWATYTYDLPANTTYFAIRCVSANAFLLGIDNVVYKPQPVLPEGLAVESYNVYRNGELLDNTAATEFTDNAPSDGDNVYAVSVVYNMGESILSDPCTVGTSGIENNSMDNIRVYEENGTIVIRGAEGKRATVSDMSGIVLHNDICSDVTVISVSRGVYVVKVNGKAIKVIVRMEPFCKIRDFYRAITDFETRFEKRYGLCLNEGMLLCCLRQEPRLSSGDIAKQLGLTHSNTSKVIRSVEKKGLIERILGDDDKRQMYFSLTQEGERCLKELECCDVEIPDVLKKILMPLVVDKNRCPQNHRCPLISICPQQAISQTGFGLPRIDSDKCIECGKCVRHCGMKAIYRLEDKYGTILMIKRVLFLTVGILSLMLAACETKAINNGKKENKMKTIELTKADFLKKIVDYEKNPEEWIYLGDKPAIIDFYASWCGPCKMVAPVLEELAAEYDGQIYVYKVNTEQEQELAALFNIRSIPSFLFIPMNDKPQMAMGAMPKSSFKEAIDGVLLKKMKMLLKRYWLPVTGILLGALGGYLYWRFVGCATGTCPITSSPFASTVWGAAIGGLFVSSFKREKKYDMFAVGFVAKLAKKEEWYVSFLYLPMKYFSQISLFSIFCFCSLFYFLSHGGEGRIVSLLPMNYKVFAPHDCHTEVELPASKSISNRALVINALCDDSIPITNVSDCDDTRVMKQAFTGKNSSIDIHGAGTAMRFLTAYYAQKRDYECIISGSERMKQRPIKILVDALRSLGADIRYFDKEGFPPLQIFGKELRGGELSLPGNVSSQYISALLMIAPYMQNGLELTLTGKIVSTPYIEMTLEMMSHFGIETHRSNNTIRVPAGRYCPKQFRIEPDWSAASYWYEIAVLAPEADIFLPNLSNKSLQGDAHIAALFEPLGVSSLFSQEGIELRKSDKTISLYEQDLSEQPDLAQTLVVTCCLIGLPFKFTGLQTLKIKETDRISALQNELIKLGYKLISSDRSLEWDGESITPKVTPVIETYDDHRMAMAFAPASFLFPGIKIKDISVVDKSYPNYWKDLCKAGFSLEKDEKEGTRLMIILISSIILLGIVTYYFHRRDLKKQVEKTNKIVQTEIQEPPQECCGRHLVCERDSLLAGVSKTIEYYDDEELDAWKGIEPDSYTPEQIELFREIFYTLRPEDVPGWVRSLQLRQIAVPESLRDEILLVVNEQRTIDKMIDILNYTFFQNALWAILLISITSAIIGTYIVARRMLFITGGITHASFGGLGVGYYLGINPTLSALVFAILSALGVEWLSRGKSVREDSAIAVVWALGMAIGIIFIFMTPGYTPGLTEFLFGNILTITRTDIFIFAAFAALLIFYTVLQYKTIIYTAFDADFAHTRGIKTRLVNYIMTFFVATAVVLTIRLVGIMLLISILSLPQMIAELFCHKFRNIVWLSGAINLLCGIGGLSLSYWLDVPAGATIVFTLIIAYFVVKIIASYLHSATGKKQMTRFYHSFTTRYNVYFNGIENYKEQLKEMEEGYEDNFTDLLLMHPAQAYANPKDPQPSGSFDRTIEKCQKAIQLHSIKKRPKRNSKKMSDPKYREYMKRDEYNPFIHNAWRLMGKAQYYKGDFLGAAATFLYISRHFTWMPDLVAESRIWQARCYIAMGWLYEAEDILLKINNEKLPESQNNWFATVNADYLVHKGEYEKAIPFLETAIKSASSKQQRIRMTFLLAQLYAATQNPTKAYQTYGKVIGMNPPYRTEFNARIKQTEVYSGKDISKEVKKLTRMASRDRNKEYLDQIYYAIGNLYLSRKDTLKAMENYRLANQKSTRNGIEKAICQITLGNLYFERREYVDAQPCYAEAIPQLKEDYPQYDLLSRRSSVLDELVVYAQNVELQDSLQNLAAMSEDDRNKAIQKIIDDLIKKEKEEAEAQQREEYLAQQQGPQFNNDNSAKQNTTILSGDKSWYFYNKPMVSAGKTEFQRIWGSRKLEDDWRRRNKSGFSMSDFAEQSGNSENEDLADNSLPDEENPDSIQSDAADDPHNPEFYLKQIPMTPEAMETSNEVVAEGLFNMGIILKNKLEDYPAAIANFNLLEERFPENPYRLDVYYNMYLMYMRNGDVVTAGIYRDKIRSVFPESPYAQAMADPHYLDNLRRMSAVQDSIYEATYAAYLENDNRTVHGNTTFMKEKYPLSPLMPKFLFLDALAYIGDKQYDHFKAGLKDLLERYPQADVSPMATTMLKGVAQGRQIAEGSGNMRGMIWKARLTNDTTTLANDTAQATFTQDLNAPHVLLLVYATDSVSSNQLLFDVAKHNFTSFVIKDFDLEIMTFNEISMLVVKGFNNFDELSHYRRVLDNSETFRYPPGVRPVMISEDNFKKLLEGYSFEDYFLFLENNPQPTEPYEKRMKNGKILWADDEIDLLKPHILFLQQKGYEVTTVSNGRDALEKAAHETFDLIILDENMPGLSGLDTLGQIKMENPEIPVVMITKSEEENIMNQAIGNKISDYLIKPVNPNQILLSIKKNLHHKEIILEKTSSDYRQEFQHISSQINDSYSWNDWFDVYKKLVFWELELAQAESDMDELLTMQKTEANSAFAKFVKKNYEKWITGGEHPLMSHELFKTKVFPLIDNGEKVFFILIDNFRFDQWRVIKPLLNEYFTAEEDLYFSILPTATQYARNAIFSGLLPNQIARMFPDLWVDEDEEEGKNLNEAPLIQTLLDRFRKRYTFSYNKINESAFGERLIQNFPQIENNQLNVCVLNFVDMLSHARTESKMIRELASSEAAYRSITESWFRHSSALDLFRKIAEKDFKIILTTDHGTVHVNNPIKVIGDKNTNTNLRYKVGKSLSYNPKQVYEIKTPERYGLPSPNVSSTYIFATNHDFFAYPNNYNYYVGYYKDTFQHGGISMEEMMIPLITLTKKMHTLTIKNLDQIQETARQFIKLMGDNTVFAFHGNMGAGKTTFIKAVCEELGVDDPVNSPTFAIINEYRSATTGELIYHFDCYRLDKIEEAYDLGAEDYFASGALCFIEWPDKIEELLPYDCVNVHIAETENGARSITLDIMRQFLLLKNQFQSAIAAQRDSMPDMRNRHRTMSAGMSAGVSFIVVAGSTFFHEDISPIFSMPRLARKIMTESIYITMRKNFCFYGGKERKGGNLIYPSIIGVFDKISRAMTTVIMKKLLLGAISFLVLFSACKDDDNVNSNTTPPEETQLVTPEVRARIADPLNQNPFTGILEIYPCNAETSIYYGNFINGNKTVFNGYYTILDGHVYGEYNRPLHLPLGTYNMVYWGTPKYDDPIYNTPAINSPGITQGVDLSNLYFRLRANTDNTYMPVYDLVHAVKPAQIGKEDLQASLTRVTAGLKIIAKMKQNEVFSPMITNIQARIGGIAEKMNFYTAETENKTKTVKFNLERSTDGTIMSNATVMLFPSAENPPLELIITLEDGSEHKLSKNLSSTLSENTKLTLNIILGEIMSGETPGDFSIEDWNEISETIEFPVINMKSLHLSPSGALKKGWELTKKHFIVMLGLVLGYMVLLWVISLLSGADTTTFRYWILYLVNLVLSVWVSAGFAKILLNAYDGEEPSFSVFGELLPKLGGLIGVNVIVAVCYCIPLVLGFIVLFIGAGASAVSFNLADPYSFGYFMGQAFGGVTGILFLVLLLVSFYIALRLMFAVYAYVEDFSIGVMGAVRKSWTMTQGNMWTILLCILMIIVLNLLGLVALIIGVFVTMIITMFMTVAMYRQIKEGEEIVIVEEMKTIRIENNFAQVCPGLKIGIIGAQVTNTETDPRLWEQIDDEASRIAAAYKIDEINKRPAIQATRKAYRSFGKDPNRYRVSSEALCRRIIRGLGIYRIDTLVDLINLVSVRSGYSIGAFDADRIEGDTLILGVGKEGEIFRGIGRGVLNIEGLPVYRDDKGGIGTPTSDEERTKITLDTKNLFVIINAYGEEMPLDETIAFTTGLLRQYASAENIRTDIVSADLFIDMKKFRISLLWQVLIAIATGIALGQFLPVPVARIFVTFNGLFGNFLTFAIPLIIIGLIIPAISDLGKGAGRLLLVTAAIAYGSTVFSGFFTYFSGRAVFPELITESAHTAAIIDNPGNMALKPYFTVEMPAPLDIMTALLLSFCIGLGLSVVKGNTLRMAAADFRDIVSLLIAKVIIPLLPLHIFGIFLNMTVSGQVASIISVFVKIIVVIFILHILLLLVQFVLAGIIGRKNPLRLLKNMLPAYATALGTQSSAATIPVTLAQTIKNGVSKNIATFVIPLCATIHLSGSTMKITACAMAIMMMSGMPINTTDFSGFILMLGITMVAAPGVPGGAIMAALGILEGMLGFDETAQALMIALYIAMDSFGTACNVTGDGAIAVIVDRIDGKKENLMQHSMKKGIWIIVTALLSLGAIIGANALVSTTNVNTMKKKLSTEEQIKIAPKAAVDSATVALKKALSQQNAPAVIAALVKQSAAQLLIDRDSLPAIIDKTTALADRSENPVEQSLLRLLTAQMYNLYLDRNYQIRWRDEINDFSLPVESWSKNMFTEKIDTLLAQATAPAEALQNTPIESYREALSIGTDSLFRPTLYDFVLNEAIEIYEGMDEYSRIQPLVRQKLLSPAKEFTTAVFSGKTVKDNRILQLYADALKFHAADELSAPFMMWDLNRLEYLGEDIYFYDESSAYYDYIGQLKTILDAYRAKPYSVEIATVLVSKLRESGKYDDAQQALDICDRWIKDFPKYRRINALKNQRNGLTGKEASFNLPNVSYPGQTDSVELSFRNVDTLTVNIYRQPDTLSFYAREQYRPQQNDWDRSNCVYTHKYGLNRPLSLIPDKKKIAFPHLAPGYYVVEMLIDGKPGSSTVNHTVSGIKTIVRSAGEKSLELLAVDAQTGKPIQNADVTVYTAKNRSYEQVKEISRLKTDKNGLCIIDTNDTRYYAFAQISTPTDGYSPLADLSYTDYWDRYDKEKKTALFSDRSLYRPGQTVYFSGIRYVNNTEESRVIPREKCTVRFIDPSSRTLSTLEMTTDEYGQFNGSFVVPQGNMLGNYTIQVDGSWANALSISVAEYKLPMFKVEFDPVKEGTSFGKPLTIKGSAVSYSEVPQAGAEVEYTISRRTNPFFRLYLPHEQIASGSSVVDKAGNFAITFTPKRESSEENINKEQAYIYTVTATITAPTGETVEQSVSVQVGDSPYFISISAPQYIDKYKSAGQIKAEIHTLNGQTVQRACRLVFYSLYDSDEESLDSLKIKMQVGEVLIAADGKAVYPDFTKWQSGPYRIVAFSDDETGRIIRNETNFVLYSDKDKRPPRFAGLWLPRTELTTEAGETVKIPIGSSFKNAYVFYSVYTPDSLIETKMIKLDNRCKTIDFKFDDSFGGLATISLLTIKEGEMTTAQATIRTAAPDKRLDIKTASFRDKLLPGSLENWTFSITDTEGNPVSARFMTEMFDASMQAIRTHRWNFNVPTPIPSLRISTTPRTEYTHNYSIRIYDFAESSYCPIESSTEFLNFGLLWYGKARPLAIRGAAQSEGYDIADFREVIGEQPVLEECVVTELSSAQKGVAVENKAISIADIAGTEESAADSYRTSEVGTAFFYPTLMSDSLGNVSVSFTVPNENATWQFYALAYTSDLFTGRYEAQTISSKPLMVSPNLPRFVRQGDEVTVSTAIQNRTDKVQEGTILFELFDPYTEKVSDSRKFAFIVDAGESRTVDYSFSVPEGIEVLGFRTKASTLQHSDGEQQILPVLPAKVLVTDSKPFYIPGGKHSTSITWSGMDKKMKSPTVENYRMVLQYCDNPVWYAVQALPPLADLTGDDAISAMASLFSNSVAVMLANSNPRIAQAIESWKATGGKNLSSLLAQNEELKQVLLSATPWVLEADNQTERMQQLSTLFDKNRAERLTREAILKLHNLQTTEGGWSWFSGMKTNFLVSINTLEGFSRLRKLGIPLDESEIKEMQISAVAYLDKMIVNQKKKNPDKNLSYEDICYLYVRSSYRDIPLAGETLDLHKKMVEKLRYWVNLSTIEKAYAATALYRYGFVEDAKDILKSLRQYAVSQPAKGMYWPNNRSHYYYNNSAVQEQCALFNAFSEIEPVTSELDAMRQWLLSQKQTNDWGAVPSTLEAIYALLEGGTDWLAPDENKTSIVWGGQEMKNSPEEPFLGLTEYTLSGNEISAAAAKAVISTDHEQPSWGAMYWQYYDDVKNVTSASVEDLALSRQIVVRQQGVQSATYVPLNRVTLKTGDRIAIRLTISVGRDMQFVCLTDSRAACFEPTEQLSGYKCRERICYYEEVKNTETRFYFDFLPKGTYVISYELDVDRPGEYTQGLSTIQCLYAPQIIARTPAQTIIIKMKFTKFATSSLISGLLLGLFSCIDNDYDLNKDINLEISVGGNLSLPIGKTDTIRLSRMIEEGDVLHVIDGKYVINKADNISENIDAIDPVVIDDFAPDFKPYTRRFETQTGEIPDIPGLEVPDIEVEFEADIHTTENFNINTEIPTEVKAVKSIKVTDNNGQTLHTTLDITISGMPVFLPRLYLVGVELKFPQVLDFDIEASNEIVRDGSSIFISKTVELSQGSGKISIPITVYGFSNPIVENGTLILTDEIAINGKIYADKQTVGADDLENTTINIQPNLTLPTPQIRVDKVAGTIVPNVDINTSVSLSDLPDFLKEEGTALEVKDLSLGLSVQNPIEAPISTKFRISPLNENGDVVNDNVVSLALKIAGGQKSDFTITKNSPEITSGSLTALLHTIPDKIDIEVTEVEVESENDDQAISLGKNDYNINIDYNINVPLEFENLRIFYNDTIEDLSSDLADITDKVKHLEISAVVDNAIPVDLTLSVEPRNEAGEIISGITLPESVKIEAAPNGNGTIQSTAVKITIKEERDKALQELDKLSIKIEGVNSDGNNDVTLRPDQFIVVRMSAKLPDGAQMDLDDLMKHNIKYILSVCIGIALTMGLSAQTLNSSYFMEKMTKRNQLNPALKTPNGYVSFPALGNFYLGVNSNLGLGTFLYPRGNELVTFLHPSVPADDFLGKLTPNNTVELDLGLDIISFGFWAWGGQNTFNLALKSYSGAYMPKEIFQFLKTGQKETGITRYDMSNITVSTDNYVELALGHARDINDKLGVGAKVKVLVGAAHAEARIDRMDISMSQDEWFIKQAGHIQASSLLKLETDPETGEITDYDTGDFGVAGFGLGFDLGATYELIDNLTLSAALTDIGFMQWNNLTRGETDPTKEFRYTGFDNIGAEDDEEGNNPFDDKADELGDDLEALAKFYKSDSQSVTNSLRTTMRIGAEYSILDNHISFGLLSTTRFGGHRTYAEGMAAVNFRPLSALHITLNGSVSNMGSSVGAILNVCAPGFNLFFGTDYFATKYSKQFIPINHARANFCFGINFTFGKKHEIMKTNRLFFVIAVYSFSFCVMGQMKIQNDGQISIGGYGSNSMGSSTLNLFPKNEKAPARISFYNSVSNPVNDVYIGRYITSENPSLFHLYGREGFCFSSSEGDVVLYDNANYGSMIQFLNVDVIGYFYSPSDSRFKKNIQPLNNTLSGLLRLSGISYQLNKETPAGTNNIKINKKENARTHFGFLAQEVKEVYPELVRTDSAGYMYVDYIGMIPLIVNSLNEIQAKVDSQETVITELQKDLAALRDGTPIGGALRKSERRNTAVESESAIVPALYQNNPNPFSATTVIRFALPYETQQADLYIYNLQGEQIRRMEIADRGEGKVTLQGSELSAGMYIYSLVADGKEIDSKRMILTKMKPIISRLRHTVVALLFALSISAANAQISYTATFDQHLLTTDTVSENGDSYLRLRYPDLWTQSAAGTPELPVHYLRFSVPCDATDFTVSVTGETTTATRYTLPVYPTQPPIPSDRNTSEQLFVSPDSTVYSNNRYWPAVPVQVVDEGFLDGDNHIVTVAVCPISYAPTDGEILFRNSVTVRLDYSVKNAGSENPSRLRAISRRATGRNNVRWGREEAKRIVVNPAQVDGFAPATATRSASSRTVTTLPDFEYTVVTNRELAPAFDRLIGWKRQKGYSAGVVCIEDILACPDFQGGDLVSNIDDDAGKLRAYLKYTYDSGSLRYALLAGDYTVLPIRYGTGRRSITIKDSQNQDSSIYVDWPIPSDLYFSDFNGNWNVDGDSLYGEFESSEMYTMDYAPEIFVGRLLCTNRQEIANYTEKLIRYERNPGNGDYSYLQKAFYHQCDELQGIHEADSVSSNFSPIFPQYTIFEEKPSYNTENPTFPSGSEVITEMNERYGFFSWHGHGNPGGIGTKSHKNHEYPYWGILAVQGVTCHHVFEESNGLNNLTNQDYPAIAYSTACDVTPFDIYEQYNVTYNIGSSFTVAGLYGGPAFLGNTRSGWIGSSVRLEKKFVEQIKEGNNQIGVAEAFSKVSFAYNKYSRWCSLTHSLIGCPEFEMWTDIPSVYDDISVARSNSSITVAGNGLNGSKVAITSGINGLPEIKTVTGASVTFNEVSPNSVVTVYKHNAIPYIAPLYLQNDTLRSSQYLHVNNVHIGQAVDTNRTEGDVVLKSGTLTLESGGDVWIDEGVIIENGATLIIECKGNVTISGGTVERGGSLRIDAGGEIMIQKGFEAKIGANVEFKMKRLLLLIAVSIVWSGSVLQAQEYEYVPLVREGIEWGYKNGEIYRFIGEEIINGKVYKQLGNSSRDYPDSYKIAGYAREENKVVYRLYSKDAEEVPIYDFNVKQVGDIMQAWHTEPGYFGMKVESLDSILVNGKYRKMIKLENQRGECIEGIGSTETGYNILYPFYQITSEFDEKTKNKLEYVKNTATGKNEWQRPNDNLDDKYEYVPLVREGVEWGYTGDLGDYRCQIKGDTIIDGTTYKKFYRYTTCGLQKNTPCYVVVRENDKKVYYREITGDNREERLIYDFSLEKGDMSILYSRSALDYMQIDVRYVDTIQVGSTYRKRLEYLIHDVIEGIGGLKNDWLVAAFTIAPCVPDCNVWIYLSYVKNLVTGEYEYGNKGACGDTYAYDPYVKDCNFGFYHHDPEDRYIWDIDVFAHYYITGEKAVNGKIYKQFVESKSCDYASGTEIALIREEDKKVYLLDGEKEWLWYDFTLEKGDTITIESASPLNPSGEKLKIPVVNTDTFEIGGKLRKRIYLRGYDTWIEGLGTENRLPLHSFEPSCGMDCGDKLYYQRIGDKISYLDNYFIHDLLEPCTSSVLDTQIEALRIARTPDALIVTLPGTGYRLAELTEMTGRLAWCAYLDSEAEGVTIPTATLSPGAYIVTLSNDRGGRIVQKVMIKMKRLLLLIAVSIVWSGSVLQAQEYVPFVHKGACGDTYAYDPYVKDCDFGYYNYNWGSVSGFTHYRIQGETNMNGKTYKGLYSLTGDSSASSEQTLIAFVREENKKVYFMDGEKEWPWYDFTLEKGDTWTIEAESPLSRHGEEIEVVVSNVDTITIGGKSRKRISFQGYYSWVEGLGDMESLPFHTFYGIPTCPCGDDMHYYRVNGDFVFKASTYWGLPIVDPFIDGNYIPFIKEADWTYYDAAPSGTTIFPRYHLAANVFNSEGVYMNDNVYYWLYRYEGCDFDESVSRQKLVLVREENQKVYVLDSIDGKYVDKLLYDFTLEVGDTLRMDEGSYYHRPEDGDDWNAIPGRKRCGDRMYRKNDPYGELDPYSGFEVIGIDSIVVDGQKRKAITWNNGNTWVVGLGEINEYPLAQFYMDYTTCITPPFYLLYQKVNGEYSYEVLAEHDFTPDPCVSGIVENKSSSLRIAHTSDALIVTLPGTGYRLAELTEMTGRLAWCAYLDGEAGEVTIPTATLSPGAYIVTLSNDRGERIVQKVMIQMSKVSVIGAGNVGATCANVLAFREIADEVVLLDIKEGVSEGKAMDMMQAAVTAGFASRIKGVTNNYEATANSDMVVITSGIPRKPGMTREELIGVNAGIVKSVVENVLKYSPNAVILCVSNPMDTMTYLIHKVSGLPKNRIIGMGGALDSSRFKYYLSQALNANLSEVEGFVIGGHGDTTMIPVTRFATYKGIPVTEFLSEEALQKVAADTMVGGATLTGLLGTSAWYAPGAAAASVVEAVLGDQKRMVPCSALLEGEYGEKDLCIGVPCVLGKNGIEKVVELKLNAAEKEAFAKSAAAVHKTNAALADALKMRRLKIYEENPNATEIGKAVEVLREGGIVIYPTDTIYALGCDALNVRAVERICRIKGINPQKVNLSIICRELSWVSEYAKLNNLYFKLLKRNLPGAFTFILPTSSSLPKIYKNRKTVGVRIPDHAITLALVEALGNPLLTTSVSVDDEEPEYGTDPELIAERYESVADLIIDGGEGGTIPSTTVDCTGDEPVVLREGKGDLQEMNXXXXXXXXXXXXXXXXXXXXXXXXXXXXXXXXXXXXXXXXXXXXXXXXXKTKREHDKKSLPPFVHAMRHMRTLLLSFAIVGLLCGCSSKSDYGEARGIVCDATMNTVTIVTDDNDTLSFSTVDTDRSGVDGLLLGDTAEITYRGRYEKGMGALKMVSYPQRALLGGDRDEHGCIGSAGYVWSEVSQDCIRVFEKGIRTESVRGDNRSVYIVFSPDSSQVELFFSDGQPNEILERRTLPSGGFAWNVEDDDTKNVRFINGLWTIEQRGEVIYREDSAAADSSLGDWQERTYEGVLPAADTPGIRYTLTVRNREYSGDGTFVLAMTYLEAENGKDETVTYTGRRFTQRGSADDKDAVVWQLVADDGTVFNFLLSKEGTSLTLLNDKFEKPQSGLNYTLRLVQMNIRVLLCTAGIAAVQVLSAIELTADSNRLEAGEAFVKWLVEYQEPGRAGTKCRWDFRGMQILSEELPVEYFIPDSSHMDILCGREGRNRYYYRQGSDSLWCVGHENATFYIDYARPELLLRYPFAYGDSLTSRFEGAGRYGQRIPLFVEGTTTVTADAEGELSLPGETFGNALRVHTARRYVRICEDSLSVSVDTYAWYVPQNRYPVFESETSTLYGTQADTILSAVSFYYPPDYLSGESDRSADDESIEEEILPIENVFTEAEYLPNPVESDLTIKYKLTRSASVWFTLHSSAGICLRRTPSREEDEGEYSVLVPMSGLMPGVYTLYVHVDDKVLSVNIIKGMKNIRIIIVLVVFPFFCIIGQNQQSLPEDRPIIPPSPRAAAFHIYGDYPVNYNTGIADISIPLYTVKMEGIEVPITLRYHHAGVKFYETQLSNVATGWIIDVGGLVSRTIMGKPDKRVPMFNVDSLEAGYLTETDEEDFKILQRLACGQLVNTVLDSEYDIFSYRFNDNVGKFVVGRFDEVIKFPHNSLKIEPEWAGHLIQKIDIYDDKGVQYRFGKSLDGQSKAVEYTGSNFESSWLLTGIKPSHGKDSIVFKYRDASRNGSFTYKIWVPNHFVEIKDGRQGDEIIEDVQGTHTYFGDSYAGSSIECLVYNGYRELLYNIKTISEIIFPLGKIVFNSIDGGERVSSIDIFDNRNELLRSVRFNTTAFDESGRWNALNSVEFLDSRRVCDSRYLFEYNDVRFPQVEHTNALDYWGYYNGCNDNTSLVPNFYLTFKRNQVKNGAWGVLEKGLLYNYTIGFCDRTPSEYFAQAYILEKIVYPTGGFSEFEYQLNRYGEDNKPGGGLRIHRIINDDGKGNKTSRSYEYSPGVLELMPDSAENYIHEADGILFQMRTENQGFIRYHEFSFRKRFYSSDMNGALTLGTGNQIRYPEVIEYIGTNEQNIGRNVYRFEEHRNLYTRSRPNNDLTFPRLHTWRRWKSGNLIETLVQRQDEIGNWVSERIIRNEYELLSRTKLRNLSVTKTTFYPPSFVRIGSLSTTDLDDLILTPDLFERLDLIYGRFEHSRSFPFFLQDRYLIDTSTPVLSETIDSLWTDNGNFVKNESYAYDSIYLKPISIVQTTSDGEMLEIKNEYVFSDAYKNEDPYKGMIKNNIVSPIIERQ

SEQ ID NO: 4 - protein, 979683 aa, Barnesiella intestinihominis (residues 653,123-979,683 of 979,683)
  misc_feature (212899)..(212913): Xaa can be any naturally occurring amino acid
  misc_feature (651560)..(651608): Xaa can be any naturally occurring amino acid
  misc_feature (731684)..(731687): Xaa can be any naturally occurring amino acid
  misc_feature (735128)..(735131): Xaa can be any naturally occurring amino acid
  misc_feature (886762)..(886765): Xaa can be any naturally occurring amino acid
EYKKKFENVLLSTQKLSYKQFYPKVFKPSEFMISFESNPFYLKSKYSRYDSHGNPLCITSDDLTTIYLWGYSYQYPVAEIKNASWEQVESIIGDAEAFAAAEIPDGMLLARLRTELPSAQVTVYTYEPLVGITSSTDPRGHTTYYEYDDAGRLVRVKEGEKTTTLYKYHYRNEMNFTFGRLSYFVIKDDNGRFGKFRSFMTNKTMSIDLNMGIQYMDEQYISIWELISLQLFLGSIIYIVGCIVLFFVLRKEVNRKYKIALLLLVQFCISVLLSLIIWQSWNIDIDIMALEFINLPALFSEFVTIPICYFILKNGKNKEIASFMKDLFYYVFYRASKFYKSWGENNNYYISGKFSLFLAFASNILFLIGLFCYILGIRYSIQIVYLIWILLFVLSFFVLNENRYKELAEKYKDEKNSQLKGWLVFAYVIGSLVLYFVSLFIYCEKYYSISPYAYCNNNPVNYVDPDGRDWYEYTDKDGNSQTMWRKSQDKIYKDDNGNTWNNIGQNYLSINGDNATLFTQHTNSKGELYLSSSSYNLADEKNANALNSTLGNLLSKGSAVAGSLGGYAEGSNATFRLTNSKGALDFKFYENGWKGNQWVTPSSISKIGKGVGHFGKLLGGLGVLASAYQFREASTFEGKLEHGLDVFMGGMSFVPVIGTGASLYWSFGGKQLHYKWVNGVLIPQIEMGINPGLPGYQPFKKKTLRKIWNVIEKGSIFAALSQNGEATGPPLEREVHFVLLLALSTGEPLLALPALALAAYAYRGVADITSRFTEKGGARMKSHTIEFTRDDLVVRITRYPAGEPGKSPSVEIEVESSGLPRSFVWFDREPQLFAFMKPIKLFYQARCPFCKRAFNYIDELKKRPEYKDIIIETIEETEHPDIADQYDYYYVPTFYIADEKVHEGGIYPNEVEAIFKKALVQEMKRFYQMGLIVTVISVLSLVSCGVHSKNSYLKEFESFVDKVENTDFDTEAEWNEALKEYERFTTTYYEEYKDKLTEEDLVEIGRLQGRFMKASMTRGAKFIEKNFNDAIQQASGLLDGLFEENEDEEMKPIGELIKERLKAEERSVAWFARKLSCSRANVYKIFCKEYIDTELLTRISRILNYDFFQYFSEHLKEEMRKFKLLLISVLFPCMCMGEGAYHEDNEFIIRAGFTGSHLRYKDNIGGTVNVSYIPFEINSCGIGWNANFTKTKDYYSISPLGATATLLTFLGYTVSSEMDSWIRTVLFCMAAESMGLYIPIGKNFELQPYWSLLRLSKWQKEKILITGAFGLAATVYIKKFSITAYGEYSYGYGNSDWWGETLSNVFTDAEDTYYNRYEKPCTPFKGWIYGVTLGFSFNLMRKLFLLGMLVVVPFVFAVQYSGTDVEEMQKERCGGYSNPPCKCCDGKGRTECTMCDGTGWRICSFCGGEGTIDRGNGKETCANCNGKGQFKCGYCKKGERICTCCNGTGKQRHVGRMRKIYSKLIVLFYVLCCNTSILFAQKDIEQEKIGCYCNTVEVEKSCHRCGGKLKSAVIKGKKKCPNCKGSGTVKSYDNGRSVRVKCTVEHNGYDASVGGYFIYEYKSGLKCENCGEEYSRMDIYEIINHRQSDRQYDPERPVEPEKIRRILEAARIAPSACNAQPWHFIVVDEPELRNQVADAVASRILGMNHFTKQAPVHILVVEERPNFTSGIGGLIKDKQFPLLDIGIAAAHITLAATAEGLGSCILGWFDEKAVRKLLHIPDKKRVILDIVVGYSTQPLREKKRKSADEVISYNKYMFSGIVEEAAPIVALKRDNGNLHLTLKSSFAHELKIDQSVAHNGVCLTVVNIEGDHYTVTAIQETLERSNLGTLSVGDKVNLERSMLMNGRLDGHIVQGHVDQTARCTKIDLVDGSRYYTFTYDLNPEMAAKGYMTVEKGSVTVNGVSLTVCNSQDNSFQVAIIPYTYEHTNFHQIKEGSIVNLEFDIIGKYISRIMHFEKDMEILLPKRNDSAQTEKLLSRTVTVVGANGAGKSRFGVEIARRIQDHAFWLSAQKALCIMPPHEVWPGSIEAMYQEFMEYSYYVSKDTPTEFDQLLFLLLSEECRNLFEYKFKTPKGGHIDFPETRLDRVQKLWERVFPRNKMLRAEGRLLIQSENSEPFNPLRLSSGEKAVLYYIAGVLFAMPNAVILVEDPEFYLHHSIMKSLWDSIENLRKDCTFVYLTHDLDFAASRVESTCIWVRSFDADRMSWDYEFIRNDDSFPEGMYLDILGSRKPVLFIEGAATGSIDVKLYPYIFPEYTVKPLGGCNKVIEATRAFADLKEIHHLESRGIVDRDRRTEREVEYLRSRHVYVPEVAEVENLLMLEGVIRSVARRMKRNENKVFEIVKNNVIQLFAQEIESQALLHTRHRIRRDLEYKIDRRFNDIGSFEDHIDHLTDDTDVRGLYNMICSQFRTFVKNRDYRSILKVYNQKSMLTNSNVCNLCGLANKDKYLRVILSILREDRPEAEGIRSTIRACFGLDKEESHGMVKDWISAARPRTLPASASPVIAASAYAFYAGTFRWVPAVLCLLFALLAQVASNMANDYFDYVKGSDKAGRVGPRRAVASGDITPRAMLMGTFCVLGVACAVGLGLVFFAGWQLIPIGVIIAVFALAYTAGPYPLAYHGLGDVTVFLFFGLVAVNMTYYVQALQFDADVFLLSIAMGLLSINILLVNNYRDMEEDAAANKRTTVVLFGRRFALWWYFVNGVIAVLLLLPCLADFGIVYIFLPAIVYLFLHIKTGLAIKQRVGEALNPLLGATARNLLVFTILVSVVWICKGLGLMSRTILFIAAFWLAVPLWGQSGIMPRRSSSIKIPSQETMEKITEADPELVSREPVSTLSDTISRALLFSPVAVDMLGFDKRMSDTKESFLLRNNTPYRLSRVVLKMIYRTPDGQMIDYRTRMVDCDLLPRSTRKCEIESFDRSKNYYHVDSPPSRVSGRPFKVSFLLLRYDIVIEPMTPAKHQQNWLPGIFNDFFGNEWIAKTSSAAPAINIVETEKEYEVQIAAPGITKDDFDITVDKENHLVVTVEHKQEESEKDKKGRYLRREFSYSQFQQTLILPDNVNTDAIEAHQNNGVLTVMIPKKQTPMMAEKKKIMVKMDLNFSWDFSTPEIYCLGILILIWIIEIIYQFYLFNRPFHFYQKEKNGKIEYTHQYPAVSVIVYAQNDAENLVKYMPKILNQAYPEFEVIVVNDDSTDDSKDILSVLETQYKNLYHTYVPEGSRNLSHKKLALTLGIKAARYDIVVFTNANCDPRNNEWLATIARNFVPGIDIVLGYTAIERKEKEKFSFWYCSYDQLLFSIRYLSFALINRPYMGVSSNMAYRKELFFKNKGFSKFLHLHYGDDDLFINEIANRTNTRVEISEAGQMTATYQDNYEAWKELKLQYDFTSKYLHTTAKSIFGIAKFFDYAFDILFVCLWVEGIIHNWTTAVLASILALSLFSIKVIVYRRAAKILRKPRLFFSLPFFSFIQPCINLYFKVIGSVTRKKNFTWRMKINVLSAIVLLLVVSSCSTSKTAYFENLDIEEMSGKMDVGNYELRIAPDDMLSITVSSVVPDAAAPYNLPAVSYSEPGKQELTIVPNLQVYTVDKNGYIYFPIVGRIRAEGMTRNELSKFIEDKIRPELKDPFVLVQFMNFKVVVLGEVKTPGQISVQTERMSILDAIGAAGDLTIYGERKNVLLMREENGKRIFHRFDLTDQSLFESPYFYLRQNDVVYVMPNKAQRNNSNYNQLAQYRISVVSTVVSAISVLASLAIALFIKMEEKYTSERRNDNIDIVALWRAACRKWYLFVGSIVVCVALVVCYLKIAKPVYEVSADILVNEDEKKGGGGLSSLMGDIAGGGFSLDGMIGGGSVNDEILVISSHSLIREMVQRLDLNISYTSKKNFFKKKEYYRNSPLTVEIPESMVDTLSSGFVVKVQTGDSDDKIKVLLKKGFFTTLVEMEATSFPIKVDYGEGIIIDKTQFYEPGKKLKFVAHVNGYDGEAEILEKRLDIDLSDKKANCISLKIRESNKQRGKDILNTLIECYNEDAVLNKNLKAQNMLSFIDERLITVKEELHEAERIVERYKRENDLSDIDAEAKIILEANSQYRKLLLEAETQYSIISMVDSFLNKPENKYSLVPVTTGLPDRGAAEAINEYNKLLLERMRLLRTAKDSNLALRTLTAQIDVMRENILNTVSKAKESSDIARTDLKKQEEDFRSRLRGFPEQEREYMDIKRNQLIKNELYTFLMKRREESAMTLAATSPKCRIVNPAYSKNKPVAPQSLILLLIACGIGLVLPVVYLYGKTVFSVKFNNKNDLRRLTDLPIAGEICHSSTSGYVVLRENSVSPAAEMFRLLRSNLQFMLPGGGKGILLVTSSEPGEGKSFVSLNLAYSIALMRKRTVLIDLDLRNPKIADYLGLSVTTGLTNYLVSNKEGGENDLIHHVAQEGFLDVITAGPVPPNPSELLLSEKLDSLMARLREKYDYVIVDTAPVERVSDTFSLTRFVDATLYVCRADYTHKNSVFNVEDFVAEGSLKNVMFVLNDTEIKKTYGYSVKHTRGMISLNKIFYGLFILMLVAGIYTYQLMWFKSSDELITLLLALLCVLDILSNKNHRRYKGLFWIVGIMTFYLLYSLVGVHYNTPKAIFYDFFIQIKPFIAFYVAYAMGVRFTGAQKLFLKKLCVVLSVAMLGIILVGLGEAFFFHVAYYGLISTVLFLIYYYCSCQDMCRKDKIIMLFILSVGFFSTRSKFYGFYVAALYLFLWYKPGQLSKVKLKQWVMMALVFCGVLYVAWDKINYYFISSGLFSGEENMDESFARAALYIRAPQALMDHFFLGSGLASYATYSSGIIGYSLLYKEYNLDEVWGLLEGDCPFVSDTYFPELVQFGMVGIVLFFYFWIWVYKKLKIIIGSPYAVHLHKIGLMIILFIFIESVAGSAFLQGSGIVVMILLGFVVRDISVIREKETRVSKEAMVKKMNRSTKFINDIFIYAIGNLGSKLITFLLVPLYTYYISPDDFGYYDIVLTLTFLAMGFITFQLRDGTFRFLLDNEDEYTRKGVVSFSYKLMAQSSLVVLLVGIVFSFFYDIRDWGWIVAFVITLSLYEVEVQIVRGLGQNKSFVLAGILTAFQIGLYSLIFVAWLRMGIAGIFCSNILSRLVTMVIIEFRARVFKRYFIVSFRDKSLNRALLKYSLPLLPNAVCWWLLGSSSRLFIEHFLGLEANGIFAVAMKFSTILETFSVIVYQAWQETAIKQYGAADRSKFFSRIFNTYILILSVLALIFVFVLKINYSWLVDSRYLESLQYLYPMFISVICFALASFYDLGYQCSKQTVRNLPGVITTTGLNLIMNYVFIRFMGIWGIVLSSILSYLFMLGFRIIDTWKFFPVKVSMEIIYPILFLIGGAIVFYRVDSIILQIIYITVIVILSYCIQPRTIRQELQMKIKALFNMKIIVINPILFTHEKGVIPHVTTIKETMIYDLCLAYHRAGHAVTLIAAADYAPEREETYDFEVVFLKSIGRKIFQPSVLPFLPGVWRYLQQRKGDVDMVLASETFSIPSLFASLIVPRKTVIWQELGAHNRKMKTWPSRIWYNIIARCFMRKAWIIPRSYVSQRFIRRYMPRVGDPIGHGVVVTLEKEMSNKKSQFLTVGRLFWEKNVISVIRKFDAFLSKYPQYRDYILYIAGDGVLREEYDRQIKEMGRERQIVLLGKLPHKELFRYYRDSKASLFDSLRELNMLAIMESVAMTTPVVTNRVPFDSEIVEKRKLGIAKNDWNEDDIARMIERNDEYVENCREYASLITVDAVARRIIDSFEKASKYNSMGKIRDITFDIAKGIGIVLVVIGHYIPDNAPSWYIGFVSFVYHFHMPLFFMIAGFFYERSIKKIGYWRFVRSKFERLMFPYFILSWAIIGIKILVDGFMQVDHPVSISALYRVFYFPEAGYFLWFVYVLFLIFCIVPVFKSGNRLVLLSLLSLGLAFWDTAPEYFCIEQFCLNSIFFVSGMWVARKSWIEQAIYRYSILWIVITIGFSIIYEFISDKFWIETLAVLLGVTGSFMILGISKSLSRLTVSFVEWLKYIGTMSMTIYLFHTLFMGVVKSILTHILSGGNIIEFVFVTLFIVGTGIVCPILLYKWVWIKNKFTSRIFKMKRMPRILLVNKFYYPRGGDCICMINLEALLRRLGYEVAVYSMVYSQNLPSEMSGYFASEISFSDGLKNKTRAACRIFGLGDIKKSFKKILNDFRPDIVHFHNIHSYLSPVVVKLAKEYGCRTVWTLHDYKLLCPSYNCLCQGKICEACFTDRFQVFRRKCMKGSRIASALAYGEALWWNRKKLQRWVDTFVCPSSFMAQKMRACGYDYTKLSVICNFIEQDKLDFFHSTEINEGEKSRYYCYVGRLSEEKGVRMLLEVAESLPFPLYIAGDGPLLNELQAKYSSGNVIFLGHLSSMEIVRLVKHAQTMVVPSIWYENNPLSVIESLCMGTPVIGAEVGGIPELIREGDGMLFRMGDKEELASAIVSVMSKDNVDTQGIARRAQKRFSEERYWAELKSVYDLMKVFAPTDISIITTYRCPMQCKMCNIWKNPTDPRLEIQPEELEILPHVKFINITGGEPFIREDLDKIVEVAFRKAPRVVISTSGWFEERVLELARKFPKIGIRISIEGLSQKNDELRGRAGGFDKGLRTLLSLREMGVKDIGFGITVSNNNSEDMLSLYRLSKALNMEFATAAFHNSYYFHKDDNVITNRDTVCGNFAELINMQMREKHPKSWARAFFNMGLINYIEGNRRMLPCEAGLMNCFIDPYGEVYPCNGLEAKYWKESMGNIRQANSFSDIWSSEQAQHVRSLVRKCPKNCWMVGTVSPVMKKFAYARHPMGWIIKNKLRSLLGKPVCLDKKWYDVGQDPMQGNLGREMKIVVVGTRGIPDIQGGVETHCEELYPRLAAMGHDVTVVRRSCYVTPQNKIKEYRGVHLKDIYAPRRKSIEAIVHTFLAIIYARWVGADVLHIHAIGPALLTPLARLLGLRVVMTHHGPDYDRQKWNKTAKSVLRWGERMGANYANEVIVISTVIDNILREKYDRTDAHLIYNGVNKPVPAKNDSYIRSLGLTPRRYVLAVGRFVEEKGFDLLIKAFARISDSNCKLVIAGDADHEDHYSVSLKRLAEEHHVVLTGFVRGAKLNELFSHARLFVLPSFHEGLPIVLLEALSYRLPVLVSDIPANRLACLDASDFFVTGNIGSLEEKLSCKLEGEMEERHYDLSPYNWDYIASQVDSVYRLGKKPRMKKLIPILFVVAVLAACQKEPSLSKLDDDYVVFTDYDKSADFGEYLTYYMPDSVLLITNNEKATYWTNEDADYILETFADNMAARGFTLVDSKEDADLGLQVSYIEDVRYFVDYPNDYWWWGYPGYWGPGYWGSYWNSWYYPYPVVYSYSVNSFLAELVDLTNKNSSNRRLTILWDSYMAGLKSGSPRLNRNLIIQAIDQSFVQSPYLTNKMKTIKHISLWVVVATCMVAVSTRGNAQAVSSTYFNVDWQFNAPVGNSYADKASGWGMNFEGGYYVMPKMAIGAFISYHTNNKYIDRQTLMLKSNSALTTDQQHSLFQLPFGLLAKYRFTTDGILEPYATVKLGANYSRMSSYLQAWEIYDDTWGFTVSPEIGVSIFPNPSVRYGFHVALYYNYATNKSKVLTYDIDGRNNIGFRLGVSFMYHRLRVGLLVVFCLSIGNLFGVFAQHSTDYYSLSMAGNAGNGIFAPYYLSANKHGLVTHSKSGYLRASVFKGLEMNKRFSYEFGIDLVGLMSSTSPVSYYSDGNLKTYNPGVSSFLIQQAYIGMKYRMIFISAGCRELTDEVVNFELSSGGLVWSGNARPIPQVRAGFIDFVDIPFTKGWVQIKGELAYGKFMDNDFLRDHYNYYNQYITTDALYHHKSISFRSNPDKPFVVTIGAELAAQFGGTKRYYKEGVLIDSLTMKSPTRLKDFFKILFPSSGDGQSNKGDQAYYYGNHVGQWNLSAEYRFKNNSSVRGYFEWYYDDASGMGKFNGWDGLWGLEYKSGKKNWLSNVVLEYLDMTNQSGPLNWCPSDYNDPKLDIEATGADDYYNNYFYNGWAHYGLSNGTAMAKSLLYNTDGYMRYKHNRIRGVHLGASGYIAPEWKYKILASYRTSWGTTFLPLADTQHDMSGLIECVYSPIKLSGWSFSASLAGDWGELYGDKWGVAIGIRKSGILTIGKMMIRRILIGLFLGIVVTSCTHNDGYIGPLFGKWQLIEMWENGTMTPHDSLYYNFQSSVIKLQLVHRGGIENATDNYFGSYVREDDILKFKIMEPSWFETELPPVFKLKMNEEYTFYIEKLTSSKMILTRGEDERFVFRKFMRIKLIVLLCIGMLCSSSIKDEEGRYESKPPYRSFILENYTEESAKHYFDTAPIDSWEGIWLLTENGERVAIERFKDIRFSEIFTHRIVKLDSSVRSEIPVGTILGYLTRGVNPNTCFIWLYKHKLTGAILYAPKRFSARLTSDLNGILFSGNSAKKLEDLFDPRSGFIKLYPKQISENSENREIRYLMNSRITAILIGLLSVTGVFATTAIEQNDSITNEIVSDSITMAMPSDSITIQVTDTDSIARQQEADKNLLSLLETDSTEQILPVIKMLRMLEYADSIRAMQGSGEIPVNPLFLPIVFEKQMSTPFQHLPSAEKCPFKPKSLSVDDKWLQDEIQAEKTRNLAQNYVIVNYPKLIHYNTDNLPEVPKQYVIENDPAKHILSIKEKPLIIKNDVGKEKIKLKRWIINFQSSIQFSQVYVSENWYQGGTSNVNLLSDQQFSIKYNDPKEQRILFENLVQWRLNINSAPEDTLHSVKISEDLFQINSKFGLKAYNKWYYTATMNFKTQFFTSYAANSNNKVAAFLSPAELNLGLGMSYQYKNDKKRFETSISLSPLSYNLQFIVNDDMDAASFGIKSGKSMSQYGSSFEGRIKWEFYHNMVWSCRLFYFTNYDHVQGDMENTFDFILNRFFSTRLFVHLRYDDARALNKDFGHFQLKELLSFGFNYKFMETKYIFVTGGVTSSLGKGIISASLARLLLARGYRVTIQKFDPYINIDPGTLNPYEHGECYVTVDGHEADLDLGHYERFTNTPTTRANNITTGRIYQNVIDKERRGDYLGKTVQIIPHITDEIKRNIKLLGSKNQFDFVITEIGGTVGDIESLPYLESVRQLRWEMGKNCVCIHLTYVPYIAAAKELKTKPTQHSVKQLQEVGIQPDILVLRTEYELSLALRKKVALFCNVDPAAVIQSIDVPSIYEVPLKMHQQHLDEIVLTKTGLPINGEPHLEPWLNFLHRMKNATKTVRIGLVGKYVELPDAYKSINESLFQAATYNDRKLDLQYIHSEKLNSGNVDAMLSSLDGVLIAPGFGQRGIEGKFIALKYAREHDIPTFGVCLGMQCMVIEYARDVLGYTDANSTEMDVTTKHNVIDLMEEQKSITNMGGTMRLGAYDCILAEDSIAAKAYGTTHIRERHRHRFEFNNEYRKAFEDAGMRCVGENPETHLVEVVEVPSLRWYVGVQYHPEYNSTVLNPNPLFVDFIKAAISKKMDKNTILGLVLMVVVVLLFSWWMQPTPEQLEAQRRYNDSIAAVEAERMAEAALAETPVSTDTVSGEVADSLKNAGLIARFGEFAPCAEGSEEFTTLSNNKVTLKFSNKGGRLYEAVLNDYMAYDSTNVTLFTGDENDYGFIIRTNARVIDTRDLYFTPEIDGNAVNMTLQLANGSQMGIRYSLPEDSYMLKMDIWQKDMDRVIPSSAVYWDFIWDQKMRRQEQGRMFEERNSALYYKFAGDDVEHLSESGNDEEKATTSLKWIGFKNQFFSTAFIADGKFNDGIFTSRSLEEDRYLKQFHAESTIDYDSKEPQVAGFNIFLGPNSYPLLSSYDDDLSGDQTLDLDKLVPLGYKFFRWINTLVVIPVFTFLGKFFSNYGVIILLLTIFIKLVLFPFTYKSYKSQARMRVLAPQIKEINDKYPGQDKAMERQRLTMDLYSKAGVNPMGGCLPLLLQMPILIAMFTFFPSSIELRGESFLWAKDLSTYDAIVSWDTYIPLITPYFGNHISLFCLLMTITNLIYTKINMQNTAGQQQMPGMKFMMYLMPVMFLVFFNNYSAGLSYYYFLSLLITIIQTYVFRKCINEEKVLAELKENQKKPRKKSGFMARLEEAQRQQQAALREQQKQRNKQQRRRMAIMNFGGVDENVVTREEFPLEKAREILKDETIAVIGYGVQGPGQSMNLRDNGFNIIVGQRKGSKTWDKAVADGWVPGETLFEIEEACQRGTIIEYLLSDAAQIEVWPKVKKHLTAGKTLYFSHGFAITYKERTGIVPPTDVDVVLVAPKGSGTSLRRMFLQGRGLNSSYAIFQDATGHAKEKVIALGIGVGSGYLFETTFKREVYSDLTGERGTLMGAIQGIFAAQYDTLRAHGHSPSEAFNETVEELTQSLMPLVAENGMDWMYANCSTTAQRGALDWWKKFRDATKPVFEELYEEVAKGNEAQRSIDTNSKEGYRDGLNKELKELRESEMWQAGVTVRKLRPENNMKEKEEQSKRQTEPVYSKTYTVEPAEGNGQQELPLTLLAKRILEVATLHAESWGVGYSTLIKNRQVWVLSRLTVEMYRYPLINEHYTLQTWIEGYNKHFSSRNFAILGEDGSPCGYARTIWVVIDLDSRTSVDISQFEYIAENISDKACPIEKQSRVRDVHDENAVIYPVTYNDIDLNRHVNSVKYIEHELDLFPFERYDKQRIRRFEISYANEARYGSTLQLLKEEEAPDYFTLEIRDDQTVYCKGRIIFENRMTQQTLYTVTVYSENQVGLLNQISIIFTRRQLNIESLSVSGSAIEGVHKFTITTYSDRETMEKLVKQIEKRIDVLRAFFYTDDEIIFQEVALYKVPTDKLLDDRSIEDLIRKHNARILEVNRTYTVIEKSGHPDETQSLFEELSRYDVMQFVRSGRVAITKSTVEHVSIFLQEQQYRQNQLMATEKISGAEALIKSLIAEKTEYIFGYPGGAIMPVFDVLYDYRDKLKHILVRHEQGATHAAQGYARVSGKTGVVMVTSGPAATNIITGLSDAMMDSTPLIVITGQVASPLLGSDAFQETDVVGITQPVTKWSYQIRHSEEIAWAVARAFYIAGNGRPGPVVLDIAKDAQTGMTEFDYKPCQFIRSYNPYPDIQPGEIEEAARLINQSRKPFILAGQGVIISHAEKELSELAEKADIPVGCTLLGLSAIPTGHPLYKGMLGMHGSIAANIKTNECDLLIAIGMRFDDRVTGDLKQYARQAKVIHIDIDPSEFNKNVKCDVSVLGDARAVLQKLNEKIAPAEHSEWIESFSVCEKVEKEKVIEPEIHPRKPLMNMGEVARKVSEATGNDSILVTDVGQNQMLSARYYRFKRSRSIVTSGGLGTMGFGLPAAIGAKIGNPDRTVCFFTGDGGLQMTIEELGTIMQYDIDVKIIILNNNFLGMVKQWQDLFFDHRYSETPMLNPDFTGVAAAYGIASERVATREELDSAIRRMLDHRGAYLLDVQIDPDCMVFPMTPAGSCVTHIMLNATEKYMKHQLRSATSTGGRRMAGARALWRANGMKETEMGNPIIAIVNSFTQFVPGHVHLHEIGQTGKKEIEKLRCFAAEFNTIAIDDGIAMGHDGMLYSLPSRDLIADSVEYMVNAHKADAMICISNCDKITPGMLMAAMRLNIPTIFVSGGPMEAGQLDGKGLDLIDAMVESADETISDEQVRRVEHAACPTCGSCSGMFTANSMNCLNEAIGLALPGNGTVVATHRNRERLFIQAARQIVENCRAYYQDGDESVLPRNIATRAAFLNAMTLDIAMGGSTNTVLHLLAIAQEAGVDFTIQDIDSLSRKSPVLCKVAPNSHYHIQDVNRAGGILSILAILEKEGLIDASVRRVDRLSLTEAIEQYAIRNGTCPPEAERLWKSAPGNRFNLVMGSQENYYDKLDTDRSKGCIRDFEHAYVKDGGLAVLFGNIAQDGCIVKTAGVDENIFRFKGRAKVFESQEEACEGILGGKVESGDVVVIIYEGPKGGPGMQEMLYPTSYIKSKHLGKACALITDGRFSGGTSGLSIGHISPEAAAGGNIGLVRNGDLIEIDIPNRSINLLIEETEMERRRAEENTRGKEAFTPRHRTRNISKALQAYAALVSSADKGAVRIIMIETRLIFVFLLLPKEWLELKKIKCIFARFYPSRKNQVIGEALKIRRVIKASLGAIVGIVLVACSPTRHVPDGSYLLDHVKIETDDKSVKPSDLKSYLRQEPNHRMFGLFRFTLGLYNLSGNDSTKWYNRWVRNAGTPPIIYDPVLIENSRMQMEKAMNNKGYMAARVDVDTVSKGKRMDVFYRVSANTPHYIDDIDYRISNDTISRLVERQYASHSLLKKGSNFDRNVLDEERQRISDMLRRDGFYAFNKELITYTADTADRSKAVDLTMNLVPESVANASGYRPYERYYMRKIYFVLSYDPTATDQIDVANAGTYKNYYFVEGDHPYIRRETLVENCFIRPGLLFSSRDVDNTYTAFGRLRIVKYVNIRFEPAGRNDEGVNQLDCYILLSKDKPQSVSLELEGTNSEGDLGFAVGATYQHRNIFKGSETFSAKVRGAYESLSGDLSGLINDRYTELGGEIGVTYPKFLFPFLRTDFRRRMKASTEYSINLNFQQRPEYTRVIWGAAWKYKWTTNRGFYRHNYDLLDINYVYLPRKTDGFLENIAPDNPLLRYSYEDHFIMRMGYTFYCSNLNPSNPVQRRTNVYTLRAAGEIAGNVLNAFSKLTSKEPDGGYKIFGIRYSQYAKFDFDYSFTHLIDERNSIAFHVGGGIGIPYGNSDILPFEKRYYSGGANSVRGWSVRTLGPGSYNGNNSVSEFINQCGDIRLDINLEYRTKLFWKVELGAFIDAGNIWTIRDYESQPGGQFRLDSFYKEIALAYGLGIRLDFSYFLLRFDMGMKAYNPAAGQDHWAIASQNFKRDSAFHFTVGYPFMLKLRIYLQFVVSRLLGTGVDTLILWICSTFIFSSYWEVYVLSPIISFEFAVLSNFLCSYFWIWKSRIGRRSTSDFCIRFLMFNLSSGAGFLMKMFFLLIFQKIFGWDVIYCNLAALLISGLFNYFVADMLVFKSRKRVKVESFDSNDCMGKETSERIQTSVLNAAEKKVLVWLAQRQPAWVTSDFLTYTGVVGALVCAVGFILAHIDKNYLWISSLGLVINWYGDSLDGTLARVRNAQRPVYGFFIDHTLDAVTICIMCIGAGLSPMFRLDVAMLVLVGYLVLSIYTYISTILSGKFLLTYGSLGPTEFRLIVILINTVFMYTSLSEIKWTIEGQTLGIFDVAGLFIACFLFVAWLVQFITDRRVLSKQDPLKPYSPKKMTYYSETPREGISLPDGTFKGVLKDGKPSWGTLTDLCGIIYEGEFQDGKIQGKGIMTFPEGQRYEGDFVNEKFEGSGMYTWPNGNRYEGQFANGKFEGRGIYTWANGERYEGDFVNGEQHGKGVFTWSDGCCYEGDYDHGKQTGKGVYTQRDGECYRGDFVDGLPSGRGFFFWADGDRYEGDFIEGKRTGKGVFIHKGGECYYGDFVEGISHGKGIYIWTDGERYEGDFVNGQCTGKGVFFYKNGNRYEGDFVNGCKEGYGTMYYPDGRYDSGQWHDDNFMGMGRVTEKWSWLNLYMSYNECIVFVFNHGTVYTDNLLLMEFLTNEKLTIVGAAGMIGSNMAQTALMMRLTPHLCLYDPYAPALEGVAEELRHCAFKGVDITFTSDVKEALTGASYIVSSGGAARKAGMTREDLLKGNAEIAARFGKDIRSYCPDVKHVVVVFNPADITGLIVLLYSGLKPSQVSTLAALDSTRLQSELAKYFHAVADEIENCRTYGGHGEQMAVFASTTKVKGTPLAELIGTEKLPAEDWEKIRQQVVQGGKHIIDLRGRSSFQSPAYLSIEMIAAAMGGNPFTWPAGVYLSDGKFNHILMAMETILDRSGVHYNPVYGTPEEDKELERSYKHLCDLRDEVISMGIIPPVSEWNKLNKNIEMNTNKFIYPASSLLLTSGLCFAQERDAVATTERPNVIYLLCDDMGYSDIEAYGQQMISTPNLNRLVNKGMSFTQFYASTAVSAPSRASLMTGQHTGHTKIRGNKEIQPEGQEPLDPNVETLGHLFQQNGYVTGCFGKWGMGYPGSGGEANKMGFDVFYGYNCQRKAHSYYPEYLWNNQEKEYQNGRYSQDAIHEHAMKFIEDNKDKAFFGYFTYTIPHAELCQPQDSIVDMYKGKFQEPHPWYDNGDYGTATNPRAQFAAMITRLDTYVGQIIDKLEELGISEKTLFIFTSDNGPHNEGGADPTFFNTEERLRGLKRALYEGGMRVPYIAYWPGTIEAGSISDLMAAGWDMMPTFVELLGEDTNWREEAMDGLSILPTLTGKGEQRQHDFLYWEFHEENGRQAVRAGDWKLIRQNIKNGNPTHELYNIAEDPHEDNNLANTYPDKVEELKVIMDREHIHSDIFNFGRMNIFFKFLAAATVATMTIPAIAADDSSNDYISSNPFETMIRLGRISEKSPVYQMPAGSANGGYISSATTSGDAVIYPLGYAKPNSPGSYFAIVSKETSLLIAGETFEFNATMTVDPSNYTLSTYTDWNRDGVFEKESRPAQVAASTKSFVQTIAIPENAELGKTRIRIRIESTTPSSADASISGRVYDFVVYVLEASDRTDRFISVSSNNDELGTAIIETPANDAGRYEIGTQVTVKAIINENSESAIEFKGWQEGNEIVSEESVYTFTVTKSTSLIAIFEAAVPVLATPEISTAEDPIWYQIMNAHTDTNRKERYIAYDTNTGGDYSTALRVEKPANQTDKFLWRLEDAGNNRVYIVNKGTNLQISGSKVLEKEYFTASTLGSQFTIESSGHENGSYSIKYEGDNSYLLNAQDGTWGVVLYNAGIGTGSGWYFYRVPLKTPTGIENGDRSVAPKAHLYDGRLSITGLNGRNTIKAVSLSGQLLGNYFSADTVFEGELKYPERFIVLVIEPENGKTTTLKLLDSKLMKKSLFNPLLLLAGLLVSNLSVAQVTPISGVVEPEISTAESPKWYTMMSSHLTASDRQNRFMKWDGSNLCTDQLTTPPTDAAYIWRLEKADGGDNYCVLVHSSGMRIVVPVEATAINNTMLEMSADEGAVWVLATSASTGQQQCADKQYCLDYTGISGAAYLNAADTSWDYGVTVYEMGTHQASGWFFYPAQYTPPTATKTVSVKSADSAKGSVSIEGKESTSVEVPETEALIVKATAADNYMFYRWVEEGTETVISYRHTYSYEGTEDKTLVAEFVEKDYPIMTRFYVTDLNQQNRYLGSVSYTAGDNTETLFTCATQEELPFTEYKKLHTPQVEGAVIDKTENLIRLEEGVENFSMNFKQYNEDITYNNGYRDIVCEPEIVWSYQTLYIDWNNDKEFSGENEIYAAVGNNSGDNTFDDPDGNVTEGWDRTITVPAETAPGTYRMRVVYMGPDPWSNDWPSKVFTEFYNEIRNGIAYDFEIAISPASGIEGIASGKVYYDAHAGLLISPNPTQTTVYNLSGQIVLQVNNTTEISVSSLEKGVYIANVGGEMIKFIKMKRYLVTGAAGFIGANFLKYLLKKYEEDIYVVVLDKLTYAGNLGTIKDEIADSRVRFVKGDIRNAELVANIFAENDIDYVVNFAAESHVDRSIANPQLFLETNILGTQNMLDCARKAWYKGKDSEGKPLYAEGKKFLQVSTDEVYGSLSKDYIDPQPLEITDADVRKVVTGRTDLHTYGKRFFTETTPLDPRSPYSASKTSADMFVRAYHETYGMPVNITRCSNNYGPYHFPEKLIPLIIKNILAGQKLPVYGKGDNVRDWLYVEDHAKAIDAVLERGRIGEVYNVGGFNEEQNINIVKLIIGIIARIMREEPEYRRVLKTDVKNINEDLITFVGDRPGHDMRYAIDPSKIARELGWYPETPFTVGIEKTVRWYLDHQDWVDEVVSGDYQKYYEQMYGNRMKGIVLAGGSGTRLYPITRGVSKQMLPVYDKPMIYYPISVLMLSGIREILIISTPTDLPGFKRLLGDGGQFGVRFEYAEQPSPDGLAQAFIIGEKFVGNDTVCLVLGDNIFYGQSFTRMLRQAVADADKGMATVFGYRVGDPERYGVVEFDESGRAISIEEKPVKPRSNYAVVGLYFYPNRVVEVAKQVKPSARGELEITSVNQVFLQSQALGVQLMGRGFAWLDTGTHESLYEASNFIETIEHRQGLKVASLEEIAYRMGWIDKEHLLGLAEPMKKNQYGQYLIRLANDELMSFDRVRWIELPKVADKRGNLSFIESARHIPFEIARTYWLYDVPGDEHRNGHAFKEQEEFIVALSGSFDIVLNDGTETRRYHMARSYYGLYVPRMMWRELDNFSTNSLALVLSSTLYDAGDYIEDFEEYRTLLKGRNDEMSKRASVDDCRLIRLPKHERENGNITVVENDIDLPFAVKRVYYLYDVPGGEERGGHSHKQLYQLLVAAGGSFDVILDDGISTRTVTLNRPSYGLLIVPGIWRVLNNFSSGSVCLVLTSDYYEESDYIRDYQEFKEISRMKYPQLSLRETNAPYMEEMKTAAAEVIEGGWYIRGKYVSRLEEQLCAYLGCRYAVATGNGLDALRLMLRAYIEMGVMQPGDEVIVPSNTYVASVLAITDNGLVPVFVEPSIHTYNLDTSLVERAVTARTRAIMVVHLYGRVCWDECLKDVAARYGLKIVEDNAQAFGAVSPVAGLQGSFHTGALGNAAGLSFYPTKNLGALGDAGAVTTNDGELAEVVRALGNYGSAERYVNLYKGVNSRMDDLQAAFLSVKLKYLDEDNRRRVAVAKVYSEHIHGKEIVLPEPGGEGEHIWHQYVVRCSERDRLKSYLESEGVGTLIHYPIPPHKQQCYREYNRLPLPIAEQLADEVLSLPMSAYLNESDVLEIARIINRFDMMEKITFKGTPVHTYGKLPKVGSQAPCFTLTRSDLTELYCHDLKGRRIVLNIFPSLDTSVCATSVRKFNELAASLDNTTVVAVSKDLPFAQSRFCTTEGIKNLIAASAFRSPEFSKDYGVEMVDGPLAGLLARAVVVIDENGKVIHAELVPEIAQEPDYEAAIKALKMPHRLFVLLFGILFMGLLPGSARQSPDKIWHKLDSIQNCRTEFTYTVTLPLTDSEINYRAELSYRKNPIDTLCGYSYLIDYKAENDTCPYANFMAYDNGDYFRFDRDRLREYHHREDKEPFAHKGNNPGVHRSGLFTELFPAEISRQLKTFVGKKDCLVQFFPDTLVQDRLCDAILVNDSIKGELSRTILYTFDTHDGMPLYRETENNPGHLGSQTVTVKYSGNDTDTKFPSDYFGETNLLKNYGEIFLRFREGTYAASDRVGQKSPEFSHKWGEHRFSSDQLEGQNCLLLFLDERGEFCKQALQIAESVSLQENLTPVILYIEKQPENIENRSGAIILEYTGKTASEYGVTGYPTLFLLDPEGTIRFVKIGYSPLLAEELELAVRQILHDRPIQAQKNKMETQEQILKEQRLKIETLRYRILLRYYELLLTLDVMTQPNEVKTLMGYINTLERYAKKYETKPVKKKSGKRKEHIDEIPVTDENTESEETDYTPDNSSNLFDLLEDSDETYPPEADVLPTDIDDFLRAGYARYLKQKENKEKNNPAHPQLEDSQPMETLLSLPTFSNLYIKLTPPPFSTPSIFPYENTAFLADIFMQTLKQLLDQRILILDGAMGTMIQRYGLNEQDFRGSLFPDSAVELKGNNDLLCLTAPHLIDEIHRAYLEAGADIIETNSFNANAISMADYRLESQVKEINRAAARLARKAADDYSTPDKPRFVAGSIGPTNKSCSMSPDMENPALRNLDFDTLATAYREQITALIEGGVDLLLIETIFDTLNAKAALFAAQESMKATGREIPVMLSVTVTESGRTLSGQTLEAFLTAVSHAEILSVGLNCSFGAREMKPYLRRLASLSPYYISAYPNAGLPNRLGEYDETPASMAAQIKEFIDEGLVNIVGGCCGTTPEHIARYREITQNASPRRPIAKDNRLHICGLEDLVVCPENNFVNIGERCNVAGSRKFLRLIHEKNYTEALDIARKQVEAGAQIIDINMDDAMLDARKEMVDFLNLIVSEPDIYRVPVMIDSSEWEVISAGLKCLQGKAIVNSISLKEGEETFLAHAREIKRLGAAVVVMAFDEKGQADTYERKIEVCARAYKLLIEEAGLAPCDIIFDPNVLAIATGIDSHDNYAVDFIRATAWIHENLPGAKVSGGVSNLSFSFRGNNFIREAMHAVFLYHAIRNGLDMAIVNPATSITYDDLPTETLALIEDVVLNRRPDATERLIDLAEKHRGEAVKKENNIDEDRHRQPVADRLKQALVKGISTHLETDLAEAVRQYGSALAVIEQPLMDGMNRVGQLFGDGKMFLPQVVKSARTMKQAVGILQPLIEQENTRNGETSKRGKFIVATVKGDVHDIGKNIVAVILACNNFEVIDLGVMVPAEKIVERAIAEQADFIGLSGLITPSLEEMCHVVSEMEKAGLHTPVIIGGATTSKLHTAVKIAPCYSGAVIHAGDASQNPLIAAQLLNPQTREEFIRSIRTEQEALRNSLKPFDLVTLSEAERYAPYIDWDTYTAPRPRQMGLHTVPVTVGDIRPFINWRAFFSVWKIGAGYASIADMQGCDHCKAVWLASFPSAERAKAAEAMQLYKEANRLLDILEAENNTSPQACYLLAEAASYDNIIRLRLPDSDFDIPCLRQQVRKSEANARYYSLSDFIRPANDGKPDYAGLFAVTAGNEIQRRIELLRRDGDDYTALLLQSLADRLAEAAAEWLHRQIRREFWGYAPDEPDLDLQSLLSVRYRGIRPAVGYPSLPDHSLFFDWDRALDFSRIGITLTENGAMMPNASVAGLYIAHPDARYFHIGHIDETQREHYAHQRGFTPEETGKWLSVMNTTNDRIIIGIDPGTNVMGYGVLRIVGNTPELMTLGVIQLNKFESHYLRLRRIFERVLGLIEQYLPDEMAIEAPFFGKNVQSMLKLGRAQGVAMAAALSRDIPITEYAPLKIKMSITGNGSASKEQVAAMLQRILHIPDENMPPLLDATDGLAAALCHFYQTNRPHLEKSYNSWKDFINKNPDKVSSGKKSDKKMIIFNTTYHADHSRKDEFISWLKNFYIPAVLEHGGLQEPQLTRIFAENEEEGISLSLQFKSPDTDTLERWHEECGETLLCDMQKKFGKQVLGFSTLLEVIDLMFGEPYYSFDKGKKNGGRSQIYLAPAECLLPRSIVKVKKLLNILYSRKNSFIFAPHMEYIRKITHDQVKTVHVVLSDTHKSMKHTDKEQLDEQYSKSIQMKQIYMSVLLVMLFTVNVFGEQHASKFGEKEKVAVVYENNVFLKAEPRNSVDDALGCPPNTVLSGAFSSDADYMGQQSSDMGRADGATKFYQSFSGCYQKVNGIRWLGRFLSWDEENYNWLSCADRGGIDENGEMTEPIRFEVAFYEMGADGYPGKEVYRKEFDVLGKFTGVSASEYDDLARIYEFSVELDETICLESGFFSVAAAKVDNETHNCAFSVFTCSNVPGIGLIWMEAYEEYMTSQLSMCYCLTGDGDYIAQKALKFERLLSPLETASDKYEKVQVEVMNIGEQAISNAKLQLYLDDKLLATEELGVTIASMESYKHTFDQRIDCSQPGKHNIEIRNVTEGDEQIAHQSMFFSITKREEGIVCESYSTDASYEYITSVKIGSINNPSEGNVYSDFSDMKTSIKPGEVLDLNVECEGGSLYIGAWVDWNGNGSFDEAGEFIGYLPKGTIKVSIPDEAVVVPGERRLRIIASYEDILSACGQYGYGETEDYTLVVEHSDNSPIIKPGLSIIDSYQSFDVRPVTLEIKNEGSAELTGTASVLYALPHSPGSKQSAFATKNSKPSWIFTKSAKSHSVKAKETESQAEFVLRYDNGLESEVSLSGGSSAVYAQYFPGNMLAGLSGMQISSVDVYINDVPDKAQVVIFGQGSQSNAGNELMRQTFSPIAQSWNHIVLEQPLTIGNTDLWIGVNIDGFEPTDFVIGIDGGHVQNGFGDMVKLGNTWWSAGDLGLNSNFCIRANVTGNRTPTINWLSLDKYEFSIAPSVMETLTVSLDATQLQRNTLYEAQIVLANNDAVSRIVKIPVYLNNDRESKVELQTLASTVVYTYGGYLVVQTDKALSSISLVNMNGAVMKMQNVDGYTTNMSLDNLQTGIYICCIVHADGSRENVKIPVVRMKVKHSRFSVGVILFALAMLPTMAQERAAQIREKLLNRNLHSVIVVSHRADWRNFPENSLEAIESAIRMGVDVVELDLQRTKDGKLILMHDSKLDRTTTGKGKVSDWTLDSIKTLRLKNGCNIKTIHKVPTLEEALLAAKGKIMINLDKADRYFDQVYELLQKTGTTEQIIMKGSKPAKEVKARFGKYLDEVIYMPIVNLDKEDAKRQIDVFVEDMRPAAFELLFVKDSNPLPRMLADSLKGESLIWYNTLWDTMAGGHDDDMSLASPDEGYGYLIDVLGCRIIQTDRPAYLLDYLRKRGLHDMKNRLLSYGIISLVLGLTSCHTNDSVKFQFDSKKIVSGKKIAIKDIAPQLPTDWDEYDYVTIEFRSTTPQRFQLGFTTDSGYNELRLISYVPNAWNKLTIPLRFFRELPVAKHDIAATSNQPRITGWINLGGKRGPLTGVDSIGIRMRAPIDNPTIELRSIALSKDDPGDRYLENKPAFDKFGQWNLGDYEGKIYSEEQLQKEWLQEETEINETENFNYSRYGGYLNKRVKSTGFFRTEQIDDRWWLIDPDGYLFLSYGVDCVAPVGDYYTKNTDKCTNMFQELPPRELFVESENVSPETHTASFGIWNLYRRYGKNYLDRAAEMTIKRMDKWGLNTLANWSDKTIYDKNRKAFILPLENIGFENELMGLMDVYDNGIEKKIDEAIARNVAKYKNNHWLIGYFIGNEPAWISKENRLCSLILNGKDRPIKTELQNFLKESGDTPDSRKTFIYNTFEKLMKAISKSLKKNDPNHLNLGIRYGYIEQLDDELLRISKESFDALSFNCYALSPDHEKMNHALEISGLPMIIGEYHFGTVDRGLAQSLWQVNSQKERGDAFRYYTENAFAHRGLIGTGWFRWIDQNINGRTDGENYNCGFIDVTDRPYPYMVDAAIKTAKSLYEIHSGTKTPFHQAPNAVGHSPIPDLWEMKSRKNLWQYTVILFILNIFFITAQTSHNQNIYADFNFSRNDTTHDKWTKSIEIITPRLRTVITDDTKITLRAPGMNRVYAYCWQQPTTGQPNKWGHDVNLTPGGIETKGAEKVSFVFPARDFPYGPTNIRIYASNNEGKKDVFELQLYNKAGKKWNYGIPDTVPSQAKGLKLVFEDDFDNELSISNDGKNARYCAHKPRYGDFSGWPFSDVDGPDNPFEQVDTYLKIKARKRAGTKGSSGLISSVNMDGERFFTKAPCYLECRFTAQSAPGTWPAFWTLTSIDRGINGDELDIVEAYGGVGKGNPNHPGYSITSHFWGQKEPDGTYKKRFNKRVPIMELGGKSYWSTTFHTYGLYVGRDETIYYFDGIEVLRHPTNDISKEKPLFFLINYAIGGISGWPIDLERFGNASDMYVDYVRVFAENDIQYSIPLPEKNKNHKSHQSMRRSKNSSKISGTRLTPSLNPVMKYNDILRIERKALFEQKNIDKVVHKKLSLSSLMKKIRAAIVGYGNIGHFVLDALQVAPDFEIAGIVRRRVSEVPMELSAYPVVSSLDELKDVDVAILCTPTREVEHFAIKALEKGIRTVDSFDIHTQICDLRKTLDAAAKKYNSVAIISAGWDPGTDSVVRALMESCAPKGITYTNFGPGMSMGHTVAVKAIAGVKAALSMTIPLGTGIHRRMVYIELEEGYTFEEVAHAIKTDDYFAHDETHVMQVESVDALKDMGHGVNMTRKGVSGKTQNQRFEFNMSINNPALTAQVLVCTARAAMLQRPGCYTLIEIPVIDLLYGDRDELVRRLVMVLSFFLLLFFVSLVGLNIGWVLANRFVFIFGLYYLCTYEDRLRFGIAKSEIKFPFVSALTFRYLCWYEDRLRFGIVKSETRFPFVSALTLYYLCLCQYRMLTEFITWTANPALYDGFIEIRWYGLFFAIGFIVGYNMMERMFRHEQVNLKWLDSLFIYVVIATVLGARLGHCLFYAWDYYSQHPLEILKVWEGGLASHGGAIGIIIAIWLYSRRVTHRNMLWTFDRLVVPVALVAALIRTGNLMNHEIYGHVTTLPWGFRFIQNLSEWMKGAAPIFTEPSHPTQIYEALCYLLLFGLLLYMYWKRNAEEREGLIFGTFLIGIFLPRFCIEFIKNNQEVFEETMLLNMGQLLSIPFVIAGVWLVIRALSRPRVPIKFAKEKKKMSHYWEDILNLLPVFCTAKYRGGVRRTEGLKNSIATLLMNPKAEKGKKPYLTLRLYFEADRKFRMIFADKAIRFLLANKNPTTFAPALSRNITGCFRKRIMKRNDIHIIYSLLCTLLLSACIKNDIPYPRIKAQILGISADGQIGTAAIDNDKRMVTMELSDTVDLRRVHIETLDLTEGAVSDLPSDSIIDLSKSYTLTLSIYQDYTWTINATQNIERSFRVEGQIGAPVFDAHNHRAIAYVNKDIDLANIKITELVLGPQGITSYSPEKEKLTDFSLGYQKVIIVYHGIMEEWTLYIVPSESEISTDGVDAWTNVAWLHGSGKEDAENGFEIKEATAGTWEKVPDEYVTHDKGSFTARMIHLKANTTYVCRAVSGDLTGNEITFTTGSAAELPNGSFDDWNKVGKIWNPWAEGSENFWDTGNKGATTLGDSNTQPTDDTWSGTGQAAKLATKFVGIGSIGKLAAGNMYTGNYLRTEGTNGVLNFGKQFTQRPTRLKGYFKYTSVEINKSNDEMKYLIGQPDTCQIFIALGDWSEPVEIRTKPSDRKLFDKNDPHIIAYADMYSGKSVTEYTPFTLELEYRDTDRIPTYIVVVASASKYGDYFTGGDGSVLFLDDFTLEYDYMKNLKYILILIGILIPGQILLHAEVQDSTTVIPETATIVPRNTSVATSEPDTIAEKHGLSRKKYKRGLKNYLLIPQKQWIAGLTLSHGEFDSKDNNLLIFIKDFNFKGNITTLNPFVGYFIKDNECIGIKLGYSHLSANLDNLDIDIDDDMQFNLGDIRYLGETFSAALFHRAYIGIDKNKRFGFFNETELAFSSGSNRFVRGSDESLKNTKTTTSEIKLGLNPGFCVFIMNNISTSVSFGVAGLRYGTIKQTTNNEETGSRRSSGADFKINLFNINIGMCLHIMNKLISAICSSLLLGVSLTTVHAQEFDRGIVLNTFIPKGQWVVGNSISYSEYSNDNYQFLVIENMDGIGYTFKVSPMFCYIVKDNLGLGGRFAYERSLTKLDNASIKIGDDLNFDMDNVYSLSHSYSGMAIMRNYISIGNSSRFGLFNELQLSLGGGESKMVNGSGESLTGTFERSFNFNIGIAPGLMAFLNDYTAIEVNVGLLGFNYSHVKQTTDQVYTGKRSQNMANFKVNIFSLGLGIAFYLMKRYIKTYFTCGLLLVGLLSACKEEDMTLGEGSVRLNVKVSDEVAVVSRAIDPGIYASMQTRIYSSKGLIRYYDRENLMPDILNLASGQYHVFVIAGDSVPAAFDTPYYTGSADFAVQSGETTSAEVKCTIANTLATVAFSPELANVVTDYKVKIFTTTGELSFTESTVDSVGYYMLNGKDRSLAWSFEGKKTDGKNYTQSGVVENVVKATKYAFTFSYNADNAATGGTFIDVKVNESTVDSTHNVVITQRPQIVGDKFDITQPLYYETNSGKEAAIWVNAATKLKNVKLSCEKFPSLGLSADSIDFLSAPEDIITEFQVKGIGAKHIYQEDKDLSNAKITLSENFVKSLPDGEYIFTIKAVDTNEKENTQVLTIVVSDAIVVTEAPARSSIWAKKATLSGTLVKETSETLSFQYRKSGSQEWISVPAVLSGTSMSAEVTQLEPGTTYEYQAVAGTQASVKTITFTTEEATTLPNSSFEDWHTPDKAMVIYPQGGEMFWDSGNHGSATMNKNVTTPDETYKHSGKYSVKLQSQFVGIMGIGKFAAGNLFTGQFIGRDGTNGILDFGRTFTSRPSKLRGYIKYTPGTVDYSETDALTNGATDIGIVYIALGDWDAPVRITTKDKNLFDKNDEKIIAYGEQELTTQTQGQDGGLLEFEIPLDYRSLTRIPSYIVIVASASKYGDYFTGSTGSTMWLDDLELIYEMKKIFYIALTIVLGLAGTSCDREKLTYDSEPGEISGKTGTLDLSSFDAIPNNDIKETEKKPVSRAVDTGDFTVQIFRADNGSETLEKDWKYSETPEIVTLNVGNYNLKVFSHEVRPSEWEKPYYYADKTFSIEESRVTQIDTLVCTLQNIKVTVSYSEDLKTLMGEDCKVSVTVGEGALDFMKKESRAGYFRSDEESNLLIATFSGTIDGYEEVNRIQVDNVKAGEWRKIHYDIKRPEPGSETGGVTPSVTLDASCEIIDHFGNVTIDEEVIEDPNPIDPGTDPDPDPDPQPTDAPKITSSTIKLGTPVTVTEGLQVSVDITSSDKNGLTGLVVDIESPTLTPDELAGMGLASHLDLVNPGDLKTAIEGLGFPTGSNVLNQSKVTFDISDFMPLLGLLGAGTHNFIIKATDAQGTTTETLILVTEMKLKKIFLYSATMLLLVSCANEDKQGSSGYGAINVQVSADYKVVPVTRSTAESASTIENPDVSEFALKLVSSDGSFSRAWDSLADFDPATKIPVGAYTMSAFYGDIDIEGFEKPFYLGETPVAVRDRENSSVEINCTLANVKVTVEYSDAFKKYFADYSTTIHSTGGEYIEFSKTETRAAYVKPGKITIQTHLKKQNGIESTFEPAAIPNATARQHYKIKLDISDNNAGEAQLNISFDETTETQPIKIDISDEVMVAPAPSFLLSGFESGVPVEAKEFNYPADKNVNISLTAKGGLAGCTLTTSSRSLESKGWPQEIDLINMSEDQAEILRRLGLKIKGFSEVGNKMGFIDFTELFTQLQIIGNSDQHMFTISAKDLYGKVSESPISLSVKNLPLTFTLQEPEAVFVGSSSAIIPVLYDGSDIDLVQFSYLNAEGHKVNCTSTVLSAEENLYQVKISVEATNKPIEIEASLSGGLKTAATSISVLTPEFTISAEEYDVWAKKAIVKLTAADPQYQDAVNRYAVLYTNSTGQWVQAASTHEDDVHTLTGLSPDTRYQIKGTCNNEQENVNYHGDCTIRTETTAGVPNGNFEELTQTISIQDMNQGGKYSVWPVDYQNTCSFTIQEPTGWSSVNAKTCNTSAANQMSWFVIPSTYNTTLSWSSYRSFGMSTQTPDIYKGLSAQDGNNAMVIRNVAWDANGTTPSKTGGAFNTTYYNTNVPSMSNRSAGKLFLGSYSYSGNSESYNEGTSFSSRPSTMKGWYKYTPDNNDVSETGVISVTLLNGETVLASGTINLTAASDYTEFTVPLVYTVTDKKANLLKIMITSSNHASYSQSEETATIKTTDYYSQYESNSRGATLTIDNLNFIYEMKIAVVGTGYVGLVTGTCFAEIGVDVVCVDIDAEKIARIERGDIPIYEPGLDEMVIRNMKAGRLRFATDLSACLDGVEILFSAVGTPPDEDGSADLRYVLDVAHSVGRYMTDYLVVVTKSTVPVGTARKVKAAIQSELDKRGEKIDFDVASNPEFLKEGNAIADFMRPDRVVVGVESKRAEALMQKLYKPFMINKYRIIITDIPSAEMIKYAANAMLATRISFMNEIALLCDEVGADVGAVRKGIGADDRIGSRFLYAGCGYGGSCFPKDVKALIKTAEENDCDMQILKAVERVNESQKELLYHRLFRYFDGKISGRKFAVWGLSFKPETDDMREAPALILIDKLCEAGARVKVYDPVAMPECKRRIGNKVEYAENIYEAVADVDALLIVTEWKEFRLPDWKTVIRSMKSPVIFDGRNIYDPSEMKELGFAYYSIGRPTVMAAPPFTVTVSGILRSALSVYNNDIGVFWFNVVVLLSMKKWVCRLSIVCCLCLFFTSVKAQLSLGGLGDILNSSTVNKVVSAIAGTDASLTVADLAGTWKYSAPACKFESSDFLKSAGGEVVAASLKTKLATYYTKAGITPSRVSFAFADTTFVMKYGNAKLNGHIVKEEESGRFVVTFTAVGGYIPIMVMDAVINKNGNTLEMLFDVDRFVKVLTTIASKSQSSTLKSVGGLLDEYEGVLMGFELVKMKKLVLTLALVFGVLAANAQYFVGGQLGLLYDDASENTMITIAPEFGYAFNDTWTVAGMIGYTHMDNFNSFYIAPYARWNFWKKDFVGLLVDGGFGISTQKYKGADSDTGFEIGFKPGISFNLTDNFSLVAHYGFLGYRTKYNGSSVSGLSLSGNEISLSLYYCFMNELATKYNPADVEEKWYAYWLKNGLFKSKPDGREPYTVVIPPPNVTGILHMGHMLNNTIQDILVRRARMEGKNACWVPGTDHASIATEAKVVNKLAAQGIKKSDLSREEFLKYAWEWKEEHGGIILKQLQKLGASCDWDRTAFTMDEIRSESVLKVFVDLYNKGLIYRGVRMVNWDPKALTALSDEEVIYKDEHSKLYYLRYFIEGEDKYIIVATTRPETILGDTAVCVNPNDPRYSFLKGKKVIIPLVNRVVPIIMDDYVDIEFGTGCLKVTPAHDVNDYMLGEKYNLPSIDIFNDNGTISEAGGLYVGMDRFDVRKQIAKDLQEAGLLEKVEDYDNKVGYSERTNVVIEPKLSMQWFVKMDKLAAPALDAVMKDEIKFHPDKFKNIYRHWMENIKDWCISRQLWWGHRIPAYYLPQSGFVVAATPEEALKLAREKSGKADLQMSDLRQDEDCLDTWFSSWLWPISLFDGINNPGNEEINYYYPTTDLVTAPDIIFFWVARMIMAGYEYEHKLPFRNVYFTGIVRDKIGRKMSKSLGNSPDALELIKTYGADGVRMGLMLAAPAGNDILYDDALCEQGRNFNNKIWNAFRLVKGWNVDETLPQPQTAAIAVEWFDAQLNRTLEEVKDLFGKYRLSEALMAIYKLFWDEFSSWYLEMVKPAYQQPIDRKTYDATLRYFDALLRMLHPFMPFITEELWQHLYDRKEGESIMTARMPEPQPVDMEIINRFETTKLVVAGIRTIRLQKGISNKEQLTLQIIGAHDHSNDCILTKMTNLATIETIEEKDPAAASFRVHATEYAIPMSNAIDVEAELKKLEAELKYAQGFLKTVMGKLGNERFVQNAPEAVVAMERKKKADAEEKIKSLEESIAALKKMSSQYDFDTIIDRHHTGAMKTDVLCERYGREDLIPLWIADMDFAVAPCITDALVRRLQHPVYGYAEAPASYWQSIIDWLDYLHGWKVKREWITYIPGIVKGIGLAVNVFSNPGDKIIIQTPVYTPFMAVPESNGRQVVHNPLKWNGSHYEMDFDHLESIIDSQCKLFILCNPHNPGGVVWPLETLQRIAEICARHNILIIADEIHADMPLFGAKHHPFASVSETAAQNSISFGAPSKTFNIAGLVSSYAIVPNETIRKRFFDWLTANELNEPTFMATIATEAAYNHCREWREQMLAYIEQNILFVEEFLDRYIPDIKAIRPQASFIVWLDCTRLHLEHDALIDLFVDKARLALNDGEMFGPEGKGHMRLNVGTPRAVLQKALEQLRSAVDGLKRMNYQRLFLSGIFLSLFMLSASAKTFIIGNDSTTVRTSDTDYADELEKIRMHMPDIEVGNGISFQPKNKSYKLTMRIRMQNLVDVDFNEKFEAQDIDARVKRLRLRFDGYIYTPKLTYLVQLGFSPYDMKTLPNGNNNIVRDAMIYYVPNSTWNIGFGQTKIRANRARINSSSALQFVDRSIVNSEFNLDRDFGIFGEYNQHLFGSLDLAAKASITTGEGRNWGNNKGSGLAYTGRIELFPLGRFTGKGDAMEGDYEREQTPKILLAGAYSYNDRALRAQGSNGDKLLFDQTRNLSSYFVDFIFKYQGFAFYTDFMGRISSSSPLIKSGENVEQYVLTGMGLNVQASYLFRSNWEIALRNSTIMPDKEVQPYANYRSHNQSTFGVTKYLIDHRLKVQADLSYNYKNEFVDSDYNRWQLRFQIELGFMSNVNKGIKIFAWITGGLILILACLFIPVMKSYLYDPVITEQTVCYVYPKWNDAQLDSALHSVIPDENSIPRIKRLLSFYKFDPDVRVGAYRLHAGMTARQMALKLSRGSQSPIRVTFNNVRTLEQLAERVSEQLFFSKEELLALLYNDSVCADLGFTKATLPALFLPDTYEFYWTVTPESFLQKMKREYRIYWEGKREQQAKRWGLTPVEVATLASIVEEETNKRDEMGKVAGLYMNRLRKGMPLQADPTVKFAHGDFSLKRILNVHLTIESPYNTYRVTGLPPGPIRIPSKQVIDAVLTHTPNGYFYMCAKEDFSGYHNFAVTLAEHQRNAIRYQQALNRLGIRMCFIIETGKETALLREKEAKRRFRRAKISGLEELIYTIIFLFFVCFIGIILSFVYSCNKHYPLSCFMEKKRQKIWTAIGVGIAIALLLYWLTLAIWIDDDTDTPMPPPVEEISNYMETRRNYTRQKKAYAPKVSEQGKLQPQDKELEEAVLGALMLEKDAYTTVCDILKPECFYEPTNQLIYSAISRLGAQQRPIDMLTVTEQLRLDGKLDEVGGALRISELTGRVASAAHIEYHARIVAQKYLARELIEFSSEILNKAFDETNDVDDLMQEAEGKLFEISQRNLKKDVTQIDPVLSEAIRQIQIAANRSDGLSGLQTGFHDIDKITSGWQNSDLIIIAARPAMGKTAFVLSMAKNMAVSYNTPVAIFSLEMSNVQLVNRLIINTCEIPGDKIKSGQLAPFEWERLMSRIEILRNAPIYIDDTPSLSVFELRTKARRLVREHGIKIIIIDYLQLMNASGMSFGSREQEVSTISRSLKQLAKELQIPIIALSQLNRSVESRGNDKDGKEGKRPQLSDLRESGAIEQDADMVCFIHRPEYYTRSKEDANGNSIEGLAEFIIAKHRSGATDTVNMKFVSYLARFQNYDEDTRLTDFSAPVTSKFNTPDTSTPSATPLSGNPDFLNPPGSSNNDIPFMEKQKQMKKRTLTAGTILLCLSAISFGQNSIKDFLHQNPQFFGSTASVYYCNDTTDTPAPKDFIPFHIDHIARHGSRTHDSKSMVPNLYKLMNKADSLNLLTREGKLLRNQIDTIYHLMNHRWGDLTPLGARQHRDMARRMYHRFRPAFTPQDGKVTLVAQSTTVPRSMASMAAFVAEMRGYTPTAEFSMDPSNGYDNTLRFFKGKEYQQYLSKGSWKKILRAYQEKHTPTRLIDRIFKKEWEQIIPDPITFMTHLYALTIILPNTDYDISLYPWFTEEEKFDLWSANNLSQYLRKANSIPGKGLPVAIAKPLLKDMLVTSQAAIDGNGVEANLRFAHGENTIPLLALLGIENAAVVEADPEKVAEVWQDFKYNPMATNIQWILYKNTDGKILVKVLFNEQEIKLPIDSEYAPYYDWELFQKYCEKQMAKYPDTTPALMIRFPNAKINLGLRIVARRPDGYHNIETVFYPVQLQDALEIVPTSQQETELSLSGIVIDGDPQNNLVMKAWRRLSHRFSLPPISIYLHKAIPFGAGLGGGSSDAAFLLAMVRDYFRLPLSDDELDKEAASLGADCPFFLHNKPLLAKGIGDGFEPIELSLKSYRIVLVKPSVSVPTSVAYSLVTPVLPEESVRDTVSRPVEEWRGRLINDFEESVFARFPEIGEIKDRLYEQGAVYASMSGSGSSVFALFDKEVDLADCYPGCFVWTGICEVMIEDCYMTGIIDKINSLYPISDDTIRTLKESMTLCRFPKKYQLIRAGMYCKSAYFIGKGMTRSFWLVNGEEITTSFSCEGGIVFSMDELYYNKMSEEFVETLEDVVVYRISLDKLRRLFETNIELANWGRIIHQDEYRRLHRSHKERLTLSAKERYEEFRQQFPQVNQRAQLGYIASYLGITLSTLSRLRGARKMQQISSAAFSDTKPHYELLDGLRGVAALLVVWYHVFEGYAFAGGTLIESINHGYLAVDFFFILSGFVIGYAYDDRWGKSLTVKNFFKRRLIRLHPMVVMGAVLGVITFCIQGSEQWDGTHVATSMVMWALLFAMFFIPAYPGAGYEVRGNGEMFPLNGPSWSLFFEYIGNILYALFIRRLSTKALTVFVVLLGICLACFAIFDVSGYGMIGVGWTLDSVNFVGGLLRMLFPFSLGLLLSRNFKPVKVRGAFWICSFVLLVLFCVPYVEGVEPICMNGLFEAFCIVVVFPVLIILGASGNTTDKTSTRICKFLGDISFPLYITHYPFMYLFYSWLIENQYFTFGETWQVALCVYVWNILVAYLCLKLYDEPVRRWLSKKFLKKRMIDCRKSLMVCIGLLMCGTFSAQESEFDLASQRSEAQDVFAVPGKKLDHKGIIINPTPHKLVLDPIGRLDISGGVCLKDKHGKFSEDLDFVTFNKKGVKLSVDFGSKVSAKYGVKSVSGAYRMNIGKNGISIVGYDERGAFYGLQTLRQLVESSATVTGELPYVEIDDYPDLKYRGVVEGFYGTPWSHEVRMSLIDFYGKFKMNSYLYGPKDDPYHSCPNWRLPYPEKEAGNIKELIEACKRNRVDFVWAIHPGQDIKWNEEDYQNLVNKFNLMYDLGVRAFALFFDDISGEGTNPVKQTELLNRLTKDFVKSKGDVAYLTVCPTDYSKLWANPTPQGSLAIYGETLDPSIEVFWTGDVVCSDLTPETLDWVNSRIKRPAYFWWNYPVTDYVRNIILQGPVYGLNTSLDSNDLCGIASNPMEHGEASKLALYGVADYTWNIAAYNPIDNWERGLGELMPKAREAYRTFAIHSCDTETGYRRDESWETKTFRIGDWNETEAQALWAEFDKVEKAPAEIEKGCTNKGLMSELTPWLQEFGKLGTRGKRALELARVYRDGKDDADFWNKYIRNLMSKKDREDYEAHKSGTMKLQPFYENAMDDMAYGFLTRLSGETPICYRGIGSFHNAKTTLSKLMFDHDTTTYYTSGIAQKAGDWIGVDLGSVKDVTEVSILQGRNSVDDVDYFDHAVVEYSIDGKAWTPLTEELNKQYIVRWNGEPVKARYVRLKRLESTRTNYASVRSFEVNPPRVEHLGFSLKSDDVQQALYAFDQQIGTSYRNNGTFSFGVAPRTEGYTLLVNELPEAGNGAPVVHLRQFRPDGSLAVESVIDSSFFKVELAEGVSEVQIEGPVEIFEIVPKFDMAEKKECEKSQNIVDEASEKEKKESLNQEPEVSEETGSEEGGEEGEADEAARLSAELETLKATIEKMQKDYLLLMAEFDNFRKRTLREKSELIKNGGENCMKAILPVIDDFERGLAAVEESNDLAAVKEGMSLIYNKFKSYLEQNGVKEIPTEGADFDTEYHEAVTMFPASDPAQKGKVIDTVQKGYTLNDKVIRFAKVVVGEMEKRDYYEVLGVAKNATAEEIKKAYRKKAIQYHPDKNPGNKEAEEKFKEAAEAYEVLSDADKRARYDQFGHQGLGGAAGGGFSGGGMSMEDIFSHFGDIFGGGFGGFEGFGGGSRGGRRHVNKGSDLRVKVKLTLKEIATGVEKKIKVPKYVSCSHCNGTGAENGTAYTTCSKCNGSGVVTRVQQTFLGAMQSTTTCPDCGGEGRIITKKCPHCAGEGIVREEEVITLNIPAGVSEGMQLSMAGKGNAARHGGVNGDLLILIEEEPHPDLLRDENDLIYNLLLDLPTAVLGGSIEVPTLDGKARIKVDPGTQPGKIFRLRGKGLPSVNRYGVGDLIVNVSVYIPENLNASEKKHFEDLKTAPNIQPTLTAKQRIFSKLRHMFEMGIIMLIGFITIGFFIFPIGITLCSIIGLCYGIIGKDKLFTRWSFIGLSVGIIFLIYTYYVIQGMMKRSFTYIILLYLLTIGCSGKSASVIGGANGSTEIIVADCDTDTILTGDDLEKFDSLFNAWVNNYNTNPITRLSSNTNDAKKLEQFPQLLNMGKKIIPCIITRLPDKNLFWTLTLYDELQDIDSLKSFDYTRGEQFRAQETLRKYVEAKLHKKKRVFNSDQEKIKAIRELAKEYGWEEDSTLSPREKDSILLNLDYEITEETFKFYKNGNNEEMPKNKIILFCFLFSWIGLHPIAAISLEKQSTVGQKIRQAIQGKNATVGVAFSIDGQLFTFNDEHRYPLMSIFKLHVAIAALQKMENECIALDSLRFIESSQIHKDTYSPLRELYPERNFYLSYADLMRYAVSQSDNNACDILIDYLGGIDIVKDRIDKLGITNYNLTETEETMHSRISNCYNNWSTPSSTLQLLEKLYNEPILNETHTEFLKNILIETSTGKDKIKAGLPDNIVLGHKTGSSDRLDDGTKIGDNDTGVIYLPNGKLCFLTIFIKDSRESDQTNTQIIADIARIIYNSAVQKMVKSKSMKKNQKCKIGLLAFSLSFFVPFFANAIDQGAGKVTANVTQPSKRTIKGVVSDVSGEPLIGVSVLVKGTSIGASTNIDGVYSVEVPNNNAVLEFSYVGYQKATLSLANASSYDVVMHEETRVLQEVVVTAMGISRESKTLTYATQTIKNEEVTRIKDNNFINSLQGKSAGLTIVPNNSGAGGGASKIVLRGSTSILGTNQPLIVVDGVPMQDGMGTQATDNMILGGGRSGDDLLSTINPEDIDNMTILKGPNAAALYGSAANNGVIVITTKSGASGSVKVNVSSTTSIETIAMYPRTQQIYGISGGDQWSAWGPKIGTRSADEVASAPYLMNSARNAVKDFFNKGVTTTNGVTLSGGTENFRTYFSYNNTYQTGLIPNNKFTRNNVMFKESFSLFDKRININTSLNWIHQKTDNAPVVGKALSALYALYRTPADIDMRYFKHNYKHLGTVADNIVSDPEKGNPKLIGQPVQTWYWYDQYLNNPYWVANMYNDYLKRDRLLANITLDAKIWQNIKYQTRFNVDYVTQNNLNEEYAGMNRVGFDYVGGKYYNGDSRSSDIYNDHMLTWNDRFNDKIDVNVAVGTSFSRHYDRNTSITTAIDTCGVPNAFVPQNNKHSRPNNPNGSATSASDSWNNKDWSTALFATASVGLFDKVYLDGSYRLEWAQSFQQFTQGSGYKSFDYYSAGVNVLIDKFLPRRDWLNQLKWRGSWSVVGNPIPNTLFARQSYDFSNGTISTRPPLFDDPQPETTTSFETGLDVWMFENKFNFDLTYYNSTLRNQFLYVTTANGESKPVNTGKIRNYGLEFQASYRWNINKDWRWQTGFNIAWNDNRILETYKTESGAPYEVQMGPNAFKIKYVEGGRYGDIYVNSFARDENGHIKINDAGNYENAVPVMASGKYETKVGNMTSPVTLGWNNTFTWKNFTLYFLIDGRIGGKVMSLTEADLDLYGLSERSAQDRLNGERVMQNGKEYILKPLPDGSGNKVSVENYYTTIGALPMEDHVYNATSLRMRDISLSYDMPNLFGKNQGMTAQFSVKNAFFIYKDSPVDPDISVSAANGYSGIDCYSLPTTRSFALTLKFNFMRKTIYSIGFLVIESVFSVGLFTSCGDQFQEEYPWLIGKQEEMDNNNEEGAGATDITVLEKELKGAIPFMINYSHEPNGSWAPHKYQYYRANSIDNYAGYWTTTKSTFAFGGPLPTLYTFPNDYLGGPMDNQIFTQSYNAIHHATELGKPEWRAVALIIQAYQGHEIVDFYGAAPFSDWRNLKRTPPLTYEKGEDIYNLIFDDLDEAIRILKERQPSREEFAKIEDLTIKTLSNGDWRMWVKFANCIKMRMAMNMVKINPGTAQSKFEQAVTDEIGVLTDTDAKDIAYYQEQNACALWRIGNEWHDIRLGASFENILKRYNHPLLTRWFDTNAYPIKEKSTGIQAPIDVYGVRTGISMRNSNTTGKDKGGYGPFSTLSGEFKYMHQSFFKRTESIFLLAEAALRGWNALGRDAQSWYEAGIRLCFQENGITDGTVIDEYLAQTAAKDIDYVDPYNNENNIAGRVKVGVKWDASDSKEVMLEKIITQKYIANFPMSAEAWTTFRRTGYPRIFPVDVNNMKDQGVDTELQLRRIPIEETANNTLEIASLVQALGQPNTGASRVFWDKQTETRGEQSPDNEFTLVIPVNFMKRYSFIFFLASFLGVTSFTACEEEATLDGATEVYITIDPMDINLKLGDTVRISATVTNVSGKVIETPVSWSIEDQTVAALLGDTAVVALDGGQEKETRLKAMLENGKYALTTVTVSRNLPDGVMCIPNDSTFTEMTSKRSYNTAHDSVLFSVSPKELLYDYDPVPTLEGLTAFDPVMTIDTVRGLVAVHYAAPRASGKGKVTLSIGDASTVKSASCDIMLAPQLLATFYGKGFENMPYINTRPSKEVLSMYFAYTYEAEMDINSEDTVRIAMNVQSGAKEDIEAGYDAYRWEVVSSNGVLITGKTEEYVKGEGFDAVLALRSGSEEGEAEFHCITPDTVFVATFRVQDFKTRYPVEEITVDHDPISMPVGSVLRLTTGVIPASSYAYHKPVVKAVDPSKVQVGEYNGNVIELRGLALGETELVLTANGKEKRVPVSVTEGILSVLWKSGNARTLFEGQTVRWGIDAKTLSGGENPYDVTWTSSATDVLTAEQTGDDNTQGTITGIKAGKADVIAEVAGVSSERAEVKVIALPVDLELNASNTVKENSVVYDEGGDLVVFISPTSGYGQIMLTLTDAYKGGGYAGHYDIPVGTVVDIDGARAEVTGSMDVSGSGDETTVSFSITGNVGSRTLSIEADSVPVVLMKKNLFLLSGILVLSFSSQAQELKEDYMTWPESPKLGQYVSSWVPGEDLFEDENFYVSRVKPKERFRNAATQIDETLTEANDRKLVFWVPVGNASNGNTNARPNGKFDSEAFSTWSYVTHYGDWTAPHGWVPGGFADVAHKNGVGVSGVASVPWGGISSEWSSGFSTLVGIEAEKVAKFLHYHGVDGLGYNSEFSTGSSFILSGLRALHETVHKYLTEKGNPVVENFWYDGTNDNGQITFDSGLGNHNNDTFGDGEHIRTSLFLNYNWHGVLGGLTQSTVDTYAPGRSSLDLYAGFNMQGGDPSTWKTLKDYNLSIGLWGAHDYNMLWADRANNGSTDVAKQTYYQHLIEQFFTNGNRNPIDKIEVYNRGNHHPDDKWFGMSAFMTARSSLKWDLSEEPFISYFNLGNGRFLNWMGERQNDNEWYNIGVQDYLPTWRWWFASDFMGKTADKVVENGLEAKFTYDDAYVGGSCLRLFGSVDNEYLHLFKTEFALSAGDVITVRYKLVGGQADVNLALSAKGDEQTILRESGFNVLTVADEADDEVWVEKTFKVSGALAMLAGKEIAMIALHFENAKNLDLYLGEFSITRGAMPTPAAPEIKIAKVLASHYKGVDGKVIFNMDNDKLPGEPVYNLDVNASMFKLYAQQKGGEPQFMGITTSWAGMYFSVPTDLQGEQEIRFGVAAVSVDMKSDSEIAWSDYMSMGEYTVTDDIQINKTTIKPGESFEISYVDPRHAAADWKLLNSTGEVVKEASNTTVFTVSEGIEEIGGYDLQVICDGETTTYGYYVQITSEAVGALPEIQSLTIGGEAVAEDEVKIDVDEALTLGYTGRKANGASSRGIEINEGWVGGRMSDLSIGDGQTFSVSAWVRFTSIPEGSCFFSVENRASSAWPVNNWGWMWSDLSSTGKLNSYTFRTATYNGAPELKYTFPNAVVTPNAWNHVVLTFEYNDQSQFRSKFYLNGVLQESTWVLDGASGTTETWANVNYSITTSDWFCFAGGRGSEPVFNNGIIDDLLVWNGAMTPEQVQNVKNGLDANSLPQEVMAYWDFETDADEDHYFAAKGSVAGAKACSFKTEALGSEGAGRQVAQNPLYISGCPFVPGSTFKVETRPTWTAKRGVLSESTGTDLEGSTKLTYSKPGDYTVTLTLENTLGADTKSYPVFKVGDVDGVEESMAGELRTYTVEGILFVEFAEDGDYQVGVYNASGMLVAQKDAAVVAGQNMSISLGAKGVYVVKVMKEGKVVRTVKVLNRMKKSYSIFLSILFCFLFCSLSAQDAQLNAASRKVIIEAPAEPGTHLEVAYRPAGSFFPSYVQSGQQVDVGTTLIIDAYSDNPTKLPLVAVRVNGEEIEKSGSGYTYVIPEGEGDIVISAEFGLLYQVDFSYSLNGRIELYAAGSEEPLTTGTRVNGNVEITVKVIPDSGCDLLSLVVNDENVTGQLANNEYKFVLKKNTSITASFQKAYRLTVEPFEHGSMRVAISDKGDLSDVPSDGKILDGQTLILWWPTVEEGYEVGSVLMNGTDITEQFFSGMYNHVVKGDVNVTVTIRKKTYGLTVKDFVGGTIKAEFEDEGVVTDVSAGGRVPENATLKIYEPVLDEGYELVYVSLNGSDIKDQFKDGIYSLTMKEDVMLVVKAKEIDKMFKLTIDEIEGGSIDVQVYVGGDLADVPADGNIKNGTMLMISEPVLEDGYELVSVMLNEEDITALFEEGVYFHTMRQDVTISVKTNYVSGVEEEQADRVRIYPNPFAESCVVSGVAAGTSVRVFNMTGACVFSKVAGTGETEIRLSGLASGVYILKLEKDGDSSCHKLIRKMGTPPISFHDTGGECDTLGLLLSQFFYPLCLLTPPSYGHSPYILCCATPQCCGARQGEEMSLLVYFAPLQGYTDVVYRKAHAALFGGIAAYYTPFVRIEKGDFRRKDLRDIDFENNRGVPVVPQAIASESDELRRIVDCMASLGYTRVDINLGCPFPILAYRHKGSGILPFPDEVERLLRPLESYDSLEFSVKMRLGWEEPSEALRLLPLLESLPLRQITLHARLGKQQYKGCVDMESFGRFYDACPIPLVYNGDLTTVEEMVAVEREFPRLSGLMVGRGLLAKPWLAEEYGNENFSSENFYCRVASLHERVFTDYKTLLQGEHQLLTRMMSFWEYLLPDMEKRLRKRLSKSRNVKDYTEAVNLLFSSLEGKNMEKEIVLYRTFDSPVEANIVKDVLETNGVPCFLSNEIFSSVLPLTNSEVGAIRLNVFAEDVEKADTILSTTQLPESEKMITFASSNKKKNNMDEKSKIPTPVISLIPLFVLVALLAMVIPIFSGDALLGGSQVSLLIASSVCVGIAMIKYNYKWSSLEEGMAKNIKKVTPAIIILLLIGAISGTWMLSGIVPTLIYYGLHTLTPQIFLASCCLICAIVSVITGSSWTTIATIGVALLGIGKAQGFEAGWIAGAIISGAYFGDKISPLSDTTVLASSTTGTKLFTHIRYMLVTTVPSIIITLIIFTIAGFLKGNVAHEQTALFADTLAQKFNLSPWLLLVPVITGILILIKLPTIITLFISSVIAGICILIFQPHILLQIAQGETLDFTTGFKALMTSVFGSTSLSTGQPEIDALVATRGMRGMMDTIWLIICAMCFGGVMSASGMIRSITDVFVRFVRKPKSAVCSTVASGLFFNTCTADQYLSIILTGNLFKELYKNRGLESRLLSRTVEDSVTVTSVLIPWNSCGMTQATVLGVSTLTYLPYCFFNLLSPLMSMIIAFTGFKIKQTFSSELSGNNSEPIKQAAMKNPILLLLAIFSIMPSFSTERDTTVIFNQKEILIKDSSEIVSVTVYENGNKYNKYYESRHIDGKKQTSWELSESVSFPFSDLISGKKKDKRKRFDPHWSGIGFGFCNAMGRGMKFLDSPTGISLDFSGSFEIFWNFVTIFTPIHRDNWGFITGIGLDWRNYVMNDNRYFTKQNGQIKIVPCPEGTHLDFSRLKTVDLTIPLLIEWQTRTFLHGPLFFSLGPVIGIKTYSSMKTKYTVGNEKVQHFNKNIKVNPINLDIMAQGGYGTFGFYVKLSPFNIMQQSHAPEMRSFSAGVMLHFMKMFYKIFISCIFLWIGNICHAQKGLAIAPLFSGKYDKDEQAIVVLLKGKTLHPYGLSLFHSISITDRPDDVTLFEAAVSTDSRKAENSETVKSGNNTIAGYYQLPPAAPDGENRFILFRKTSPHDATLIYLEGQTQLDKLINLFINKKQMTDKNIKHGKRNSDYWDRLIERYYSGNTTIDEEKELSRFVFSESQNKRYDEIRAVLSYSLIGNSIKGKIQSRQRVALKMIARIAACIAIILSINILYFHSPRDICVTYIYGKKYTDTETVIEQMKHTVSQFDPTDITVEKELSSIFRPLENLQMNQEPLLSAFTRLRDNLLSMSRHILQNEDDASDAIQEAFCRLWPIRNKIKSEKEAAALTVTTTRNICIDQIRKKARFPELDIETNNECDEDNSEKENLLERFQTVKLLIEKRLTENQRKILELRDYQGLEIEDIANRLNMQPATIRMNLSRARKTIREQYKKLNAYDRMKTDKTKNWTDSWKEQLDEYSVTPPPEVWEELSKELAPRRIPFRKRTIWWAAACITLLLCTFIGLQFLRPTTDLNNLPLQTKISGSEQMEVSRMQNTVPSIKQEPLDIIAQSYKPIRAPQTPDHTDVENHTPSQINESRHIEQPESSEPEKSTPGKKRNNAQTSLFPSRNENTSTTTIHTHTQPKTKPKSTWSLGVSLGNNLIASADNRNGFSNLAPYASAEMASLPSEKNLSNSEGPVTTPYQHIMLQNINSQPKTDIKHHFPVSVGITVQKELNNRLALETGLVYTYLSSDLTAGGAAYYTQNQQLHYLGIPLKLNWNFLKKRYFNLYLSGGGMLEKCVHGELSAQYEMNNRPPFSNDETLHINQLQWSVLASAGISFKLASHISLYAEPGIVYYFDDGSDISTIRKEKPFNINLQAGLRFNFMNEAELVECCKRKDMTAQNELYQRYAGEMFALCIRYSGNRDFAKDLLHDGFLKAFTSLDKFFYRGEGSLKAWLSRIMVNTALEAIRKQTQHIELDIETAPEIADPEYEDDDKIVKNIPQETLLRFISELPDGYRTVFNLFTFENKSHKEIANLLHINEKSSSSQLHRARTILMNRVKQYWAQYENGMKMKKFLLVGLLGVVTLCGLSSCGDDDDGGYVPFSYAVGDMVVKDGSEPYIQLDSKQTLFPSNGSRLPNYLLKDGKRVIVNFSFLEGQREGYDYYILINDIDSVLVKNVIPITPETTDSIGNDPVNVLDMWTSDKYLTVQFEMRGLGREKHMINLVRNYSLSPNPDGDGYLQLELRHNRLNDPEIDHILWGVASFRLEDLKLENPDLKGLKIKVRSPYGTEVRTCDFEKEDSGEDAISGTQEKSVSTYVRMKVSDLIKNSGSTGFSFEILPPLKGSSIEKSFKAIDTLREFAPLYINITTHRSELVYKDTPDGLFRRVSERSRPGTVAVAAAIKNKYQIPTVPHLICSGFTALETEYALIDLNFLGICDLLILRGDKAKHENRFIAASGGYEHAIELEQQVNRFNEGYFIDGTRMDLVSTRQFSYGVAGYPEKHDESPNPDEDMKWLKAKVDAGADYIVTQMFFDNEKFFSFVDRCRAAGITVPIVPGLKPISKASQLTLLPRVFHVDIPDMLVREIVKCKDDSQVKQVGIDWCTAQSLELKAKGVPSIHYYSLMAVDSVYQVAKSVYMFFKDVIGQEEVKRRLLRSVDNDHVAHAQLLCGPEGVGKFAMAMAYARYIHCTNRQNGDACGVCPSCRQHTALTHPDLHFVFPMVKVDKKKRICDDYLPEWTEFLKENTYFGIDSWLRYINADNKQAVIYGEESESILRKMSLKSYESPYKIMIIWLPERMNDTCSNKLLKLLEEPYPGSVFLLVSNNPDRVLGTIRSRSQLIEIRSLSTSVIAEALQRRYGITEQDAVSVAHVAEGNYLKACESLQLNEENKLFFDYFVQVMRLAYARKIKDLKIWSEEVADLGRERLRRFLSYAQRMIRENYIYNLHVPALTYMNREEAQFSSRFAPFIHERNVQAIMKHLSDAENDVGQNANAKIVLFDLSIKLIMLLKSMNVEEFREYCLSLKGVEEKMPFVNVADRYSRDVLCFYVGDKWFCFVNVEVFDFCCIKCDPVESGELQARYMGVKPGWHMNKMHWISVYFNRDVSDEMVRKLVKKSYDMVVKRLNRKERERLLMVASVLSVPDNQSEDKHVESSLVPRLDEGSNPSSSTINIKRQMAGKKANKKQVHPHLSGVQKAVVSFANMFEENRRINREVQRVIKRKTPQKVRTILYGKRGRRIEERFFCVVCGSSYGEGWRYKLEEDTYLYLCSRCKEVVRPQLTVKAIYSSNFEVQRKKHMKKISLLTFLLGSFFLLQAQPYTKHIAPIDNEKWWGCFVGIGNEMPFASNTPLYDLAKVNFNNEASPLLLSSQGRYVWSDEPFRFRLVNDTIVIESDHESPQVVTAGKNLRDAYLHASKTHFPANGKTPPALFFKEPQYNTWIELMYNQNQEDILNYAHNIIENGFPKGILMIDDNWQRYYGNFEFKAEKFPDARAMTDELHRLGFKVMLWISPFVSADSPEFRDLADKGFLLKNKNGTPAVVNWWNGYSACYDMTNPAAVESLKQTLNECMEKYGIDGFKFDAGDIVILANGEYDYYDKNADQNIFSQRWAELGLSYPFNEFRAAWKTGGLPLVQRIGDKDYSWYAVSMLIPNMAICGMLGYPYACPDMIGGGQFASFLDIKEDEFNQELIVRSCQVHALMPMMQFSVAPWRILSRKNMEICARYAQLHHTMGDYIYECARHAAKTGEPVLRHMEYSFPHSGFTECKDQFMLGDKYMIAPMITEGTHRTVYLPKGTWRDDQGKTFKGPKKIEIDVPLDRLPYYERVKMKKHYMLFTLLFTLLPFLNSYAEENKAITIPQLSFSSPTSGYRLEIPETILGDRNGGETDRSGKSFTISAWINMDQYTNNSGSKGNVIMGHGPRVHMNYNGSLVLATTETGVLKIISGASNKVTSVLETSVDLDTWTYLTLVYDNSDFSVSVYKDGTLVATKNNTQQLELFGDDPCIFFVGGAGFSGFCDEFQFFDRALNSNDVKQAYSNPQNISGLTVWYDFNTIEEGSSFTNKVTESDQVNTKATFYNLTGGQTNSDGGYISITNYTEAVPSLTKGRPTPSNYTVTLPTEITNGTLSVMNGESPLSAGENTVTSGTTLTITATPADNYRLESLNINGQPIENGGTYTVTEDATITVSFVEIVMHKVTITVNEGVDYQITAGEEVIENLESIASGTELTLTFNSLPENKKIESVLINGQPAEAEENGSYIFTVTENTTIVVNLTDITYYTVTLPTLVENGQLSVMNGSDPLTTGENTGIKEGTVLTITATADPGYEILSLQVNGSDFTNGDNYTVNENTTVTVSFQVEGPKAVLVPAISGNNKYQFRFDDKVLGEHTNGENNSWNNGNITGSDHRARNFTMSAWVKTVSTNGQVMGHGQAPYYGAVGTFGVVLENGVLKMKARAWKDKGNCPGIAEVTTNATLTADEWAFITVTVDDTNKEIKLYKNGKLLGTGDLGTIVEGGTQEGHGIGLLQDECVFFVGNGGFSCYVDEVQVWTKTLTEKEVKESIRGGYAQENMPEELVAYYKIENDSEAELENKGTFGSCPAGVVEGTTEVHTGAPHWGAEVYTCDFIQVQIVAGHTFPTNNLTITQPTEGGTFKVVNAKNEEVTSGAVDQFSALTVIAEPEEGYVLSQVLVNGEVNSGTTFVIEDDTEVTVVFSNKVIVTNTTATGGNVEMFVNDAEEATAFGSEIIRGSKLTFKVTVNEGYELTSFLVNEEEKIGELAENIYTVNAVSDNMTICAVFSKIPTWRVTCNVTGNGSVTISDDESNVYASGSEILNNTFVKLTFIPEENYKIETFTSSNGESLLDQISNNIYEIGAIDSNHTYNVTFGTIVGIDKENIKSISLYYQDGILYVNGIDANTTIAIYNLTGKLVKVTEETPVNVADLTKGCYIVKITMGNTDKAMKFIKKMYILSPIANTVLRNTTGYFSFHYRRYFRTPPLSCPITLSGTLPISSAMSTGRDDQALITSPCIFYPSVQRKPPLYFAQQNTGGRGGVTWPNNRQSVYNSSLNTIKKLLRTSHLHDSYRIHFLLSQKKMATKIRLQRFGHKDYAFYQIVIADSRAPRDGKFIERIGSYNPNTNPATINLNFERALYWLTTGAQPTDTVRNILSKEGVLMKKHLLGGVKKGAFTEEVAEQRFEAWLKNKKSAIDAEKAKVSAAKDAAAKKRLEEETEKNKAKAEVVAAKKAAEAAAKAEAEAAAKAEEEANAVAEAPASESAEMKILFFQYPSCSTCKKAAKWLKDHDIDIESKHIVETPPTVGELTEWITRSNLPLQKFFNTSGQKYRELNLKNRISTIPEKELIELLASDGKLIKRPLLVTDSQVLVGFNAELWQDVLLSETKMLLFYFRYNNIIVYLCHTITFYKLKIKNGLYPDKVGWDIVLALDVMKPLYQELPFAVDNYINFYREDLPHFIVPWHYHPEIEIMCIEKGWGTRFVGDHIGGYEEGDVCMMGPQLPHEWRNDKEFFDSDSGLRATCHCVYFRKELFEGILIRLPEMANIRELIERSRRGIKFTGESRERIARYIRRTFNQNGIERVTNLLTLLEMMAEADEYEILASVGFTQSVNSSDFERFNKVYRFLVKNFNKPIKLEEVAAVAGLTPTAFCRYFKERTKKTFVQYLNDMRIGHAKKFLIEGKMKISTLSMEVGFNNLSNFIEQFKKSTNMLPSEYQEKYGVKKKKIIMHENYIKELQRGSYSDFNNLYNLYVDRLYGFVYNLTRSSDMTEEIVQEVFLKVWQIREHISPDYSFQSLLFTIAKNKFLNSLRKQVELYSYDEYITQFDNASYLENTTENDLSFKELNENIIGAKSKLTSRQKEIFELSKEENLSNREIALRLHISEQSVRNQLSCALKVMREELIKKGLYVVSWVFWLLECMQGLINEEEYNEFSQMVLDENDEKIFDLMDECICKNTNAYVMPSDVKLNLYDRIWEQIRKENIRVRLRKISSLAASILLPLFIFSTVYFYFQVDEYKHRPNVIVAENGQKAEFTLPDGSKVHLNGGSKLSYNAAYNGRLREVSLEGEAFFDVKQDKEKPFIVKTSVFDVEVLGTSFNVSAYDDEDMSEITLVEGKVKLSLNNSDDSPVYLTPSQKFVYSKNGKEGHISFTDEEYELAWKKGVLMFNAELIENVFQKIERWYGVSIHYESDNIIHDRFTGEFEALTIQEMMNILRMHYNFKYKIENNDIYIIMRNQLLYGGILLLATACSSPKNFSVEDGNTFIVIDEKASVPAVLAAHELQHFVQQSSGIELPIVNNAPSNGSKLICVGKSPYTAEFDTMKLGEQEYFIKVSSDKVVLMGQDENTDRDDGRDNNGITPSKDRLKVNYSQLVNDTASQIELVLPSVYDAQGTCYAVYDFLEKFVGVRFYGPHPMNVVVPQQTKLQLPVSEIRRTPDLKYRVGTYSFEWPMMKDQYFKPSGEMWQLFLRRIKFGGEKWAANHAFTSYQDRFLKKNPEHPELFESYHPEYFAQGRTGGPHERQFCYTNEAFIRQVAQDARDYFDGKPLKGSQIALGDYFAVVPLDNAYWCQCDECQKQLAIDEGNIRGEHFNCGTATHYLWTFVNNVAKEVKKTHPDKKIAALSYHVYAYLPKDIQLEDNISVAPCLHPRNYWAPKMKENELAFYKDWIAESKESGRPIYLWNYLCFPTERGLIQDFNVFPGFNVHAVSDQIKMYAQDGVRGIFLCGIGEQLDFYATMKLYDDAQTNTDEMVDEFFALYFGNAAPAMHDFYDKIESVYANSVNYPMDIQTREAQFHQTEEIAWKYLGTEPVMEELAGYMDKAVQLASTPIEKARVESWRTGVWEYMKAGRAKYFSKLEKMKILKFLSLLIFSGALFGSCSSKDKVGDEQIRIIPLPNYYQSQPGVFEMDKNTVIGVDLSDTNMVSLANYLNEKFMRTTGFGLSIKSASEGIVFTLVEENDLGEEGYRMSVTPDGTQIYANTYHGIFNGIQSFLQLLPLDSTGDIAKINCIDISDKPRFAWRGLMLDVSRHFFTKQEVKRFIDLMAEYKYNVFHWHLSDDQGWRVEIKSLPRLTDVGAWRAPRVGNWWEREPQSVTDSLTYGGFYTQDDIREVVEYARERFITVVPEIDVPGHSMALLTAYPEISCTGGPFHVNVGNTFYTKEENSLCVGKEKTFAILDMIFDELVDLFPSSYIHIGGDECYKGFWAKCPDCRARMSSKQLQNVEELQSYFVKRVASHMQSKGKHVIGWDEILEGGLAKDAIVMSWRGMKGGVEAARQGHRVIMTPFEHCYLDLYQGDPAVEPNTYSMLRLRDCYKFSIVPDSIDASFVLGGQGNLWAESIPHYRQVEYMTWPRAMAISETLWNETDSRNWDFFIQRVESQFRYLDRLNVNYARSIYDPIISPSINDGELKIELTTEISGLDIFYTFDNTNPDCYSNLYTTALTVPKNATMLKVVTYRGKCPIGKQINLTIEELKERAKKKEMQFIQINSNDYLLALSPNNNFIKHFVAGSQAINYVKTNIIMKHIVLGRRPVWLRSILILFLLSGVILSTNAQDPHLSIDLNKVTIKQFFDEIQRKTDYTFSYREGVLDNDRDVVVSAKNKSLSEILTSVLKPKGLSFSIQAKSIVVTRQTLAAQQSTVKGRVVNSSGEPLIGVTVYSKDNKRGVATDIDGNFSIRVGSGKTSLQFTYVGYKPETVPVKNRDFIAVTMEEDSHMLNEVVAVGYGVMRKSDLTGSVTRVGNDKIANTPTVRLDQALTGKVSGVHITNTTGEPGAATNILIRGGNSISASNEPLYVIDGFIGAGDLNLIDPNDIESIEILKDAAATSIYGSRGANGVIIVTTKRGSEGRNDVTVNAYVGVQQIAKRLEMLNAREYAVMLNQQDVLSNQEPSIENPSVYGKGTDWQDEILRLAFMQNYQVAASGGNKDGRYYLSLSMFDQDGVIKNSGIRRYQTRLNLDRKMRHNINIGANFQFSYTQREPNLVSLGGFDYQSSALATPPTMNIYNEDGSYASDSPSRVVSNDIDNVVAQLNERKKQEKAASIYAGIFAEWEAIKDLKFKTFLGLNAGTNKTSEYKSSMLPTMRQNKIKGEAWINQGESYSILWENTVNYMKEVAKGHHITALLGYTLQTSRSEGLSLYGKNFTNDLLTWNNLADSETSTRLVGSSASEWAIISYLGRINYSALDRYLLTVTGRYDGSSRLGRDNRFAFFPSVAVAWRLSEEPFMKQFSNLDNLKIRASYGLSGNQDIALYQTWPLMKQQNVILTGTPQIGYIPDRMGNDELKWETTSQFDFGVEASFFKSRLNIEFDAYIKNTKDLLLDVEFPYTSGFKNGFMNVGKISNRGVELMIRSTNISTNDFTWSTEFNISHNRNEVVALGPDKDFEYTFRPGLGNHPYTWLKVGEPVGAFYGYIMDGIYRTREEIEAGCEPNASLGQKIYRDINHDGVITIEDQTTIGDPNPDFFGGLSNTFRYKNFTLNIFLQGTFGNDILSGGDFLYATVDPRFVNQYKRVKDFWSLDNPGAKFPKLYSNDEYQPSTYMVHDGSHLKIKSVSLYYNFPVKKWRRNKVISELQCYVTGTNLFTFTSYKGYDPEVNTGAEGGYNVYSANVLRGMDFTAYPPARTFTFGVKLTLMRKLRMIILGILAVCMGSCTDLLDKEPISQLSVNNLFNTEEGADAAVVGCYSFLYKPGYYWQERWVFAFEGTDISGNGGGSANYQWTAGENRWSDWWLTTYQAICACNVTITRLGMSAIDSDVKEKLLAEARFLRAFYYYHALTYWGGVPLLKDEISSLDEVKYVKRSSRKELADFIIEEAGDAAKILDKDPAVATRASKGAALMLKAKVQMWQEEWENAVKTCEEIKNLKKYDLFDNYSEVFSEQYENQKEHIFSVQFDPGYTEFSAHMLWYLGPSKDEWDKFNGLGGSSAPESFYEKYDEWDYRLEQNLAKTWRNQPFKDSRIAILKYWDRTGSQMLDHDGLNFPVYRYADVLLMYAEALNEWKKGPTTEAYEAVNEIRRRAGVDEIENYDYQKFKLFIQDERARELCYEGHRRFDLVRWGILVETVKKISKEINSRGDEYVDERHNLCPIPETEIIKNGNLEQNPGYETANKMKSIIKIILIFLSVIAFVACEKDDEDFSPKDSYLYVWNVRTWEVDTESKLSDIKVTYFFKGDTARVKQINFWVIKENSTLYAEEAMQHQDRAFQLTEIQNDPDQKEYKNQCSFRFPETITTDYDGDPFIPGEGYRLVVKALGKDDMIVDSPTIESGVFTIYDPNAPEEEEMNKKLIVSFLSFVSCFCLFAQTEGNKAFQLNVNNGDAYLDCGDVSELNNTSQYTIEMWVNVTLNDLPDRFIIFKKEPTETNRIKVQVEKNGQIYVMQSNGGDGAFAQTPVGTYPESGWHHIALVYDGEKGTSGNGAMILYIDGVKQPLSDATFKGTTGNMEGSFAVGGPALNVQYDEVRIWNKAMEAVTIMEWKGCKVLDSHPDKEALAAYYDFQNVSGTEVPDLAGQYPAVFEESEASILDTELAILEKQPEPIAINNGFKLNVNNGDAYLDCGDVKELNNTSQYTIETWVNVTLSDLPDRFIIFKKEPTETNRIKVQVEKNGQIYVMQSNGGDGAFAQAPAGTYPESGWHHIALVYDGGKGTSGNGAMILYIDGVEQSISDATFKGTTGNMEGSFAVGGPALNVQYDEVRIWNKALAAKVISEWKNYKIGDSHPDKNNLVAYYDFENISGTQVPDLVGNYPAMFESNEAEILLNDLALYEKDDIPTEIENSIVAEPETLQTVVSGGEITLIASVPQNVYIYNLAGRLVLDLRISAGETVVRDLPKGFYVVNRQKVILRMKKIYFLCFLCLFSVMTTMAQLSGNKGFKLNINSYDAYLDCGDIATLNNTGAYTVEMWVNINLDELEDRFIIFKKEQSDERNRIKVQVEKNGQIVLMQASGDGAYAQTSAGAYPRSGWHHVALVFDGTKTSMDEGVLILYIDGIKQSFANSFFKQQTATIDANFVLGSPSVACYDEVRIWSKSLSAETISKWKNYKVLDTHPDKDALAVYYDFQNVTGTTVPDLKGTYPATFKSSESEIQDIDLKIFEEVGELTVESAMVSQNTGYAYVKEENIQLLTLKVNAVGAGERYLTGLDFSFDGTTKISDIVSVNVYFAGEDHLITEDSYTLNYQALRPGSTGKVELRADVNAEKQLLSVGNNFFIVAVRLRPTAGEMNKLDGQITKLYFDNGSELVPQDPSPVGDMTIRQIYTLDQEAYEKKCEAYNNKIVFGWFPWFSVNSIDKVDWKGLTHVSPIGFQIDQGNYVPTFEDKSIDLKWPWIDFINAAHQNGVKVVASITGNVRDGGNTQFYIDLFSDPQKMRAAAVAIAEFVEKYNLDGINMDIEEFYNTISNIGQKYNELIGYIDEELEKINPDFELSVATYPGNEEGTWDFKGMLKKSDYLTIMMYNIGSTFTCPLPDAKRRIKQFWLDIDIPAADIVIAWPYYGNLFEGGRNVGTAVLGDVPKYSKDGNITWDESAQCNVYRYTGENGTEVTAYVEDLESLALKYEYTKTGGFKGIGIWALGQDAGMEEGAYDLIRKNFDTTYDGSGIEGNNRASDNISIFPVPVQDQLNVRTASDSSFATVNIYSATGQLVVSQTIFASSGAVDVATLIPGYYIVQVQTETESATFRMVKKMKRILSIILFAAGVFGVGQAKEQLSPDQTLWFTSPAENWAQQALHIGNGYMGASFYGSVNRERFDIAEKTFWTGGPHSLSDFKSPIIKGGKDKIDEIRKLIVEKKYVEADSLCRKYMVGNYSHYGYFSMVGNLYIDFPESEHPVKDYVRGIDLSTSRGFVEYVQEDTYFKREYFCSYPDKLMVLHFTSDKKNKINFNLSQILTYPASQVKKETDGLVFNGVIKGNGLKYCIRIKVLQEGGTVSIVNQNICIEGADQATVLYAVDTEYKQEYPLYKGENPQNNTAKIIKNAGIKGYEKIKNDHIADYQALYNRVKLILKGDELSEKLPTDTRVRQLQNGFTDDSSLKTLWFNLSRYLIISASRPGTLPSTLQGVWNTFEKAPWNGNFQSNINLQEMYWSCGPTRLTECENAYISWVKDLVESGRKTAEEYYGTRGWVSHSTGNIWGHTVPGDDILWGLYPSGAAWHCRHLWEHYVFTQDIDYLKNEAYPIMKEAALFWLENLTPYEGYLIAAPTVSAEHGIEMRNGSPVEFSTVNGEECAKKIFTVPAYQDIVMIYDLFSNVVDAANALHVDKEFSKNITIAKDKLYPLKKGKYGQLQEWVADVDNPRDHHRHIAHLYGMYPGNMISYTYTPEWANAVKKSLEMRGFGEFGDRWPHTGGNWSAAWRIALWARLHEGNTAMYIFNRLIKENGYENMMSNQSGNMQVDATMATAGLFAEMLLQSHDGFIDLLPALPTEWPEGKITGLAARGGYIIDIEWKNGSLVKAEIKMSKGSIFPVVKVNGTSISDDDSRIIVKQLMGGLFILKEKGYNCLVQILFLVLQDYEICGVIWFLLLLNNRLFVVSLQMENMEIVFPRLFFTGNRLLGERVENVSRTLGDLRGIFADVDAFSRMPQNMPAYEVSSFLPEQEGTPGGLYFGITYLHPGKVGNEYFMTKGHFHANIDRAEFYWGLEGEGMLILMDQLRRVWAERVFPGSLHYIPGGVAHRMANTGNTLFSFAACWPSDAGHNYREIADHGFAARLLEVDGKPQLIGVMGGNYSVAIDLGGTIIKIGLILDSEIVRFTTISSDSVRGLSHMLPKMEHAIDSLLSEEGISSTDLVSIGLAFPGMVNPVECRVISTNDKYDDACDIDLCHWADSRWGVPFVLENDARLAVIGEWLYGAAKGTGNVVMMTIGTGIGTGVILDSKPLVGHHHQAGSLGGHMVVDYRGRRCSCGNIGCVEAMASSFFLPDIIRSNERVSPDFKIAASDMDFKQLFGLMRQGDENAIIICEECMNVWAAAIVSYIHAYDPEVVVLGGGIMRSADIILPYINKWVEDRAWTPIDRVHIVLSELGDNAALLGLNYYLTSVKRRRNEKVFKLMKKYSNYKSNYDKYPVVQVSETSENVCWQGWPEIVSQLNKSLENVHKPVKVLVVECYQGVYDEEVKSVLKGQLPHTLWLDASSAMKTSEEINSFLKSDITDDEIFGYMTRYHMDCYFDEKKIAELREKVAGISAGVVIVYGVGAAYVMPESDVLVYADMARWEIQMRFRRNEISNVGVDNRMERASLQYKRGFFVDWRICDRFKKTLMNKWDYVLDTNVMGDPKMATAAIVDAGLKKASKSPFRVVPFFDPGPWGGQWMKEICDLDRETPNFAWCFDCVPEENSLYLGFGEVRFEIPSIDLVFSYPRELLGNPVYGRFGDEFPIRFDFLDTMDGGNLSLQVHPLTQYIQEKFGMHYTQDESYYILDAEEDASVYLGVKDGIVPEEMINALTEAQHTGHFDAEKYVGNYPVKKHDHVLIPAGTVHCSGRNSMVLEISATPYIFTFKLWDWGRLGLDGRPRPINIGHGKHVIQWNRTEPWVRREIYNKIDKVAEGDGWIEEHTGLHECEFIETRRHWFTKPVLHKTDGSVNVLNLVEGREAIVESPTGEFDPFVVHYAETFIIPESVKQYTIRPYGESEGKQCATIKAFVKHNVMEFNPGFDIIPTVNPMGFKYGADVFGPQVENRYLRDIRGSLSDPQCDGPEIVYSIAMDVGKCKHREMLERMHLLYGVVTYAAGRLGKEPIRSQGHIHWVSKYSGWSTPEVYEIWTGEAIIYMQEYAEDNPGRCFAVYAKAGDVVIVPPYWAHATISANPDKPLTFGAWCDREYGFEYDGVRRHKGIAWFPVFNDEGKIEWQANPCYQPSELICKSPAEYPELGIVKGESIYRTFEKSPDTFLYVPNPGLKEEVWKNYEPMMKNTIIYVIAVIAATGGLLFGFDTGVISGAIPFFQKDFGLDNSMVELVTSAGLVGAILGALFCGKITDILGRKVVILASAVIFTIGALWSGFAPSIEQLIIARLFLGIAIGVSSFAVPLYIAEISPANKRGSLVSMFQLMITIGVLASYLSDLMFADEGDMSCWRPMFYIGVVPALILLIGMAFMPESPRWLISRGRDEEGKSVLARIEGNEAMEDSYKTIKNELIKSEKDKSGIKELMKPWLRNAVIIGVGIMFFQQFVGINTVIYYSPKIFLMAGFDGAVSAIWAAVGVGVVNLLFTIVSVYFVDRLGRRKLYFTGLTGIFVSLLLLGICFTHFSYLGEMGKWLSIILVFVYVAFYAISIGPLGWLIISEVFPQKVRGLGSSLGSLSVWVFNTVVTFTFFKIVKAFTVEGTEIYLDGENLGNPAGAFWFYAIVALAAIIWGYFYVPETKGVTLEKIEEYWRKGGKPRHLRMTRKKQSKRGLRVCCLMGCMVLLFSQPFGISAQQTEQGGPGKVSAADSQQFISGKVIDASGVPIIGATVHLKDSKNVAVTDMDGNFSIKSDQKNPILRVSYIGYDAVETSVKGNKSVRIVLKENTKALDEVVVVGYGTMRRSDVTGSISSVKGSELVKNSTSNVVQSLAGKMSGVQVVQNSGAPGGDVSILIRGVGTINDASPLYVIDGVPVNGGMWYINPADVESIDVLKDASATAIYGSRGANGVVMVTTRQAKEGRTEINLDYSFGIQQSAKTFDMLNASQYAALHNEMRSNAGLSLNPLFADPESLGAGTDWLSPLFRTAPMHKVNLSILGGNSKINHATSVGYYAQDGIMKNSEFNRLNLQSNISSQILSNVKVRANVNLSAENRRTQPISTVIQNAMRMLPSISIYDDEGNYNGPTGNAELNGDALNPVAIVNEQKYRMKGFRMLSNISAEWEIIDGLVAKTTGGAELGYEYNNNYIPKYKWGNKEQTNTSQSLSSAYEELYLWDNSLTYDKVFGKHKLNAMIGTSYQEYKKEWMSAAGTGRASEMTTELDNATKATDVGGNSYSWALMSYMGRVHYSYDNRYFLTATFRADGSSKFGADNRFGYFPSFSTAWNVSNESFMQDVPWISMLKLRLGYGLTGNQNIDAYAFADKLEVNGVYNFGSQRGFESEQVSLIYPYKLSNPSIKWESVEQYNVGLDIGFLNDRIIANVDFYLKNTNDMLTKKPVPQTSGTSLEQADWPPVNIGKVRNKGIEFNLNTRNFVGEFTWETNLNMTFNKNEVLKLGGPEILSGVSLIREGLPINSFYGYKMGGIYQTLDEVFAGVPMENRAPDKASHNSQVNTSPGDIWFVNVNGDDVINDFDRTVIGNPQPDFIFGFNNQFGYKNFDLSIFFQGSYGNDIWNGVRVSHEGMESTYNQFTSTLNRWNGEGSSNTMPRAIYADPNRNNRASTRWVEDGSYLRLKNLTFGYRFTQDWLKKIGAKSLRLYLSFDNLWTLTNYSGLDPEVGLWGLDYGIYPTSRVYMFGASVKFMKRTIISTISVVVLSTVLSGCMDKLEILPNDQIITENFFEEGSPEEIESGVNSMYQRLQSSYMYNLRMWTLDIVAGEGRVGNEAGGNGLETTQLSNFTATSDNSGAKELWRGPWAGISRTNWILTNIDKSPKISDAKKTQYKGEAHFLRGLYYFNLVRLFGDVPWIDKQQTASDDLQVSRTSKDIVYQHIIDDFSDAASMLPAVYENTTDIGRATKGAAFGLLAKVYLTLKRYNETLVAIDSVMNLGVYSLNRKYEWNFSDLRENGPESLFEVQYEKDVTAYSEFDILGQGGWHHEYMAPLASINIGGPWGNFGWFAVYPEFVESYEPGDLRKSVSVWCEGDVYQGWSYDPTCSQTGHNVKKFLCENIGVDRAMDSPLNFPVLRFADVLLMQAEALNELGRSSEAAAPASSENDGGPLNRVRVRAGLPNVTTTDQVELREIIRHERRMELAFEGGHRWFDLVRYDNDGEYAKTFFQSIGKTNFTTPKHLLLPVPIDDIDANPNLLPNNPGYMKIRILTLLFSAFIIGASYAHDDLVYRTASEWSFDAGNQSTISETYGSVFLGGAVVADYNGDGIPDICEIDTSGEEIRWIWKLGNGNNEWSEIEAITFGETATDKCAVGDFNGDGKADIAVMRSGSSLATWYIDYAPCDGQFDEKGRFGLSGDIPLSGDFNADGVDDICVYRPSSGTWYVCFADISGYPEFESHLAINGVLFGTSGDIPFVGDFDGDGYDDMALLRASENRVLVNLYDRKKPKYEHYADLNGVGVSDLEITVPVQNVVAVSAADIDLSRPKSLPLATQEEVGSEVNLRHGWTCIFDNSLDVDKWAAALQYAGINTLEYHPWMRAHEEVAPETETWNTYVGDDRLWTSKAMMKQKVEKFRSIGGRSICYTGIYASTPAFALAHPSWAMKNEADKSFMTYGGSYLYLMSTNENVNAPYEVNGKNYKSFNEYFIAQAVAAQQEYNYDGYRWDWYGLPETYVCDGLAGTGNFSYEMAQFVNQLDIAVKEVRSDVTTTALQLPSTSGNVPHLTTGAVVNHQFMELWPYGTGTKYSDLYRDIYDAKSRYPDKPVFANFYPPTEMNLSTSWPVENIDYQFATCLSAGGYPSAQVVDGVAGFTDPVPFHAVNYPASVLERIAQWNKFVAAYGAYFYYSNPAYLITDYVRGDFTVSGSNSGVFGTLKKRYDKRTREIDAFVVDLVNYGNSLDLRWDEVNTVPSSTQVSVSFTLPDGFVADKLYCITIDGRNEVPYSLNGNKVEVSLPSVSVFASLVLTSTKSQELPSEPSGVGSMPELFTFGYDAKGETLNKDEATYIPVMQEGKPYVVASEFGGNVAEWYEITDAYQGESAIRVTAGDIRFNTTDNGAIRIPIEKFNRFKLAVRSNNTTTSWFGFRLLKPSETSSVWESRDLYYRIGYSQPNIAYITLTPVKPQNGVWVEYERDILSDVIGLWGAEWANAIVTDVHYGPVDRNSADYDNLIFMSPDYNSGIDNQKKNDKIKCWTENGRICIEVSDFYRGKEFRLQITDLSGRVIGMEDCIVDSYRLLSETILSMPGAYFIQAIDKETDVTVLQTRCIANMRKIVFLLTALCLSMSAWSQDGLVYWSQADGYKFDFDLDGTVDFSLPTQTTDKAISQVFVFDANGDGYFDLCELDLNDNLINWIFYYNDGNNNFVDPQTVIYGMSEGDKKLAGDFNGDGIGDVGIRRDNEFGLWWLITFQAMAPDVNQQFGISDKDLLVAGDMNGDGQDDIVCYDKGSWLCSFTPSDTEYKTPDFVSKDVQVTFGTSYDIPVLCDVDGDGYADMGLCSVDDEEVSFNLHSATKTANNGYSSDNGRGTFDKVVLMPSGINPTCVCAVKSKGTTGIESEHAVANVSVYPTLVRAGDSFTVKGNDVTKVKIYGMMGQLVKEIDTDGSMSTVVVSVDGWAQGTYFVCCESEGAVSSSKLIVQMKIYLKYIFLFLIAGSIFSSCNQKDEKVYSFWALQNRATGEYLYEDDGECKFSREKQGDKSLWKIAAAEGDHVCIVNKKSGRYLSLDNGQVVCSVVDQPVTESAEWYYGNFDFVTQTNSGWYTISNRSAESNLHLVEKDGTLCMQDNANRNTDFSAHWTWVREEGTPLPYSFTPDGVTDASFLGIRTAKAISPTEIHSDYHGEKVWKLSQDISSFPKFSTENNLLIEALYNMALEEMLMDVRSDSTFRAGALWPDTWTRDAVYSIWFSYAWIMPEVSRKTLDKQTLRNPREALQDTGSGGSWPISTDRVVWALAAWEYYLYTGDSSWLEGAYEGLSYTARKDIHVAFDKRIGLFKGETCSMDWRTHTYPNWFTNVTIGSSFSCGTNALHMFMYEFLSKAAGILGKPESEKTYWESFRNVLKDSINKHFWNEDKGLYECYLYPEISGYKASERVGVMSNGLCAVLGASTDEQIRRMVGNFPLYPYGAAVLYPSIPDDFAYHNKSIWPVWQTPYMYAARQVGNILAVEHMAASLTRASALFLTHKENMTYDTGYDRGTALNSDRQLWSVSSYISLVYRVLFGMNLTERGIAFNPVVPDIVNGWLSLSDFRYRDVTIDIKVSGKGNRVKSLKVNGEKQALPFVLPADSKGEYSIEIEMMIDEPKGKINLVKAGPGKCWSPVEPVLVLNGSTLSWKEEENMKYYLHSNFSEVDKLVTSPYDLIGAPDGFYSVYAVDEKGFASDMSNAVVYSTWQSVCEAEQSSHSGTVSNLHKGFSGSGFVIDLFARPANVKFQVQVPEAGDYAIALRGANGHGPHGTWCAIRSVAVDGNDAGTFILEATGDWKQWLDSNYIVLRGLNAGEHTVSLSIDPEKKGYDFNMSHGREDANDCHIDCLKLIRLMLKKLRIGGQFAPVRILRNVCYDSAFELSTDISGAESCCAGLVSLSGQGDRTSCSCAEEADMSRINMIICTPAIFFHPISVMDFKKIFSVVVCAVGIFFSMTAESKDGCLNSYVSADSLLLYEYYESHIWVSPLNYPRVFSEQRAVAPDWFHYRDRVIELRVLALRKRIWDEYLRDFPLERLSVRVWLMFSLRTGELETVELMFRRDVLEDTDSFPIREIIAMCMNSDWSGSTYIMEHKPDKYDNMYTGYIFPLYMLEQLRIGRQFASVRIFQNAYYGSAIELSPGIFRAESCCAGLVSLSGMWLVFSLRTGELETVEVMFRKGILEDVDSFPAREIIAMCMNSDWSGSTYIMEHEPDKYDSMYTEYFFSLYYMASYSRKSTRNKALWGYLLLIAVLLSSSWFVYHEINLLVSIKAVEADMRLKRQEMSSALSSLYRAETVGQSLVWGQFSDYPVYRRVTNDAVTCVDSLRRITSDSVQLSRIDSIIGLLNRKNAVIRRLMGTTIDVAEEQNRKIEDMMKQQDSLILIQNRQQRLVRQSDSLIEKRRRKNVFGRIADAISGKAPTRLDSIRIESKRIGALSDSLAADLKAMESGYNEIRELSQQALERERWRLRNDNQRLNGQINRLMNSFEREQLIVSEKIQERNEQIRQESMRALVAVASGAILLAVIFGVLVWKGWLRDDRFRRALEEARRRAEDLLEAREKLMLTITHDFKAPLGSIIGYVELMMRLDNTERQKFYLQNMKASSDHLLSLVSDLLDFHRLESHKLDINRIAFSPKVLFDKIVSAMQPVADKKQLNLILKVEKSADANFSGDPLRIKQIVDNLLSNALKFTARGTVTIHVFVRVRYLVFSVSDTGRGIARDDLEHIFQAFTRLSSAQGVEGFGLGLAITRQLVDLMGGRIDVRSVEGVGSTFTVEIPLEEVSEKTGDTKAFSGKRCLLLDDDKLQLTLFENQLKQLGIESVACMKAEEILGYLEHEHFDALFTDMQMPEMDGVSFLKFLRESHIALARKLPVVMVTARSDADQFLSEGFSGILHKPFSLAQLSFCLSGIWNEEATPREIEDEGERGEAPYDFAALTAFAEDDAKARRKILETFFQEINSQIEELKGAAARRDGIVVSRIAHKWQPIFAMLKISDMLPVLSRLEEEGAHKWTDELSRNLDKLLVYAEKIRTGLKLVLAKEEMKHILIVEDDTTFAVMLQTWLSKKKFSVASVSGIAAAKKTLIESSVDLVLCDLRLPDGDGIDLLEWVSNRNVNVPLIVMTSYAAIPSAVQAMKLGARDYISKPVNPEDLLQKINEVFNAGVKTGKQIPVSESVPEETNYLEGQSEAARQLYTYVKLVAPTSMSVLINGASGTGKEYVAKRIHQLSKRSEKPFVAIDCGAIPKELAASEFFGHKKGSFTGAIEDKVGAFIEADGGTIFLDEIGNLSYDVQVQLLRVLQERRVKPIGTTTEVKVDVRLIAATNEDLKAAIKSGAFREDLYHRINEFTIYMPHLCERGEDIPLFANFFLDQANRELEKPVPGFLPEAMERISQYTWPGNLREMRNTVMRAALLAQGNPIRVEHLGIDMNIDKPINILHDPDSERTKIVSALQKCSGNKSKAAAMLGIDRKTLYNKLKLYQIEMKKLMLSVAVFMMGVSTLGLYAQDSNVEPVKKDSVPTEEPKKEEPKSEAAWVCMSEEPAKTDSVPSQEPKKEEPKTSSVYMNEEPAKTDSVPSQEPKKEDVQKIFSIRMVENDSIGWYVAKTYRQERKIKDLLARMGIEHFVPFHQVVKEINGKRKKVEEPFVNGLIFVRGNKKSCIELINEYGYPMRYLRDFSTRSLLRVPDKQMEDFIYLVDRHENEIELFPHDLKRGDRVRVVAGTFAGIEGELIRIAGHRRVVVRLENLFSIATVFIPGGYLEKICDRMRPVIKYISFYDFADSGIARNYSVAAANKMDYIIESLVRIGYDVEVVSASACIESGTFRWYKSRVEERQPHVKTRFFSSFRCRSKILVLLRLIWGVLQLLSYLLFCVKKGESIWVYHSLYYYNVILLAKKIKKFKLILEVEEIYQDVSPVPRYMERWECKMIDVADKFVFSTDLLNDKVNRQKKPHLVIYGTYRCVPVMSERHGDNKVHVVYSGTLDPNKGGAMAAAGVAASLPSTYRVHILGFGNPGEIQAIKELCEEMSGKGGAVVSYDGVLKGSAYIDFLQTCQIGLSTQNPDAAFNNTSFPSKILSYMSNGLQVVSADIEAVRRAYGISGYIYYYQKQEPSDIANAILNVDLDNPFDTRAVVQSLDNRFVEQLSLFLRDRVMIEFSDIKGKYIGNKNLINNVLGSFLVRGFGFLVSFALFPLYLNYFDDNTVLGCWFTMCSVLSWIQVFDLGIGNGLRNHLTADLSLKNYESARQYISSSYILMGGVTVFISFLAFIISRYIDWNSVFNISEQSISPESLRKGVVIALCGVLCFFFLKLIISILYALQKSALPNFLNLLSTVLLLIFLWVYDPTGDVERDFVTISWVQAVTGCLPLLVATIIVFAKDLKECLPSFKYFRWDKATGVLSLGILFLVLQLLYMIITVTNEFFISYFFDPSFVVEYQIYIKIFSIAGTFVSLALIPVWSAVTKAFVEKRYDWIIKLVRFLYFVAGIAVLFQLAIIPFLDPILEFWLGEKAIEVNLSAALLFALLGCVMIWVSVLTSVVNGLGTLKCQLYGFLWAVLFKVVAIVLFSSWIPWTIVITATIVGLLPYCVWQPVVMNRQLKMLNKEAFQNGMGKKLLIVNTYANLWSTGRIAAEIGEIAVKHGWQCYFAYASESNPCSCEEIRINKSVISYIIHTYLFSRILNLKGFGSWIETKLFIRKIKKIAPDIIHLHNIHQNFLNLPLLFSFLKKAGIPVIWTLHDCWAVTGGCTHFVYNKCENWKTGCYRCPRCGNSDTGGELKGVFRTMPWVLRKKEAYITSVPNLTFVTVSEWLSGVVRSSVVGSVPVQVISNGVDSTRFYPRTDIQAIKQKYGCGNRFMIVGVSSHWSVSKGLYDYYKLRELLPADQFVVVLVGITSEQKNNIPDGIIGVERTENLDELALIYSAADVVTSLSYQETFGLTIVEGFACGTPAVVYDNTALPELVDSDTGLVVETGNMERLAEAIRQVCKTGKSFYSQACREVAQTRYDKFCQYEKYVELYEQALVPKKVMIETIVIGLICVFLAYLGRYRRLSWGFGAAMTILFVFLAIRYEWGNDYRQYIDKFTVYNSIDEFNYSDPNERWEVGWIFLYRIFKPFGFFSLVIVLTAFEISVYYWFIKKYIPKEWYWFAVFIYVFNPNFMLTQSSMMRQTLAMCIVLLSIPYIYKKKVIIAALFILFASLFHSSAKILLPIVFLGFVNWRMGKKGVIIGVVLFFAILLFKNIVTSIIENTLSVTGLGKYTYYLEEGKEESKLESGIGFVYQIIIMSMILYYEKRQDRKDGLIFKITALSFLFVPLGFIAQLIARIGMYLQVSMIATYPLMIRTINNRIVRAGTLFVIMFFTIYDFFSFFNSEIWRDSFIEYHTIFESFIWRMRVAFLMGLFPKDNRNEIIKNSRGPIQFAADALEWGYVKGISEQNIKCELFNAPFIGSYPKRYGKPFYTSYSNEKISKWVNLTNVGFCNYTGYKLISRWICMKRSIRRWYGSSYGDTTVLIVYSIHTPFLKAAVDIKRKYKNTKVVLIVPDLPEYMDSKKSFIQSIFHHINRRIQNKLYEDVDGYVLLSKYMQERLPVKGKAVSVIEGMYYSEFDNHFLDGGICMEQSDEKILLYTGTLDARYGIVTLLRAFMMLKNPSYRLVICGDGDSRNTVLECVKMDNRVSYKGQLPREEILVLQQKATLLVNPRTSEGEFTKYSFPSKTIEYLASGTPVLLYKLAGIPDEYYEYCFTVEDNSDEALSKKIDEILNMDRAVLRSLGMRARKFILTEKSPKNQCKKLVDLIERIVESMSIFKDKILLITGGTGSFGNAVLKRFLDSDVGEIRIFSRDEKKQDDMRHRLQNPKVKFYIGDVRDKRSVDSAMSGVDYVFSAAALKQVPSCEFFPMQAVRTNVFGTENVLDSAVEHGVKNVVVLSTDKAAYPINAMGISKAMMEKVAIAKGRQLGDSATTTICCTRYGNVMASRGSVIPLWIEQMKNNAVITITDPNMTRFMMTLDDAVDLVVYAFEHGRNGDLFVQKAPAATLVTLATALKELYGKDTPVKIIGTRHGEKLYETLVTREEMARAEDMDNYYRIPCDSRDLNYDKFFVEGSEVVSQIEDYHSHNTHRLDVEEMKQLLLKLDIVREDLNLNMIKVGITGQSGFVGTHLYNTLGLYPGEFERVPFEDDYFVDVERLKTFVKSCDVIVHLAAVNRHTDAHVLYETNMRLVKQLIEAMETTNSRPYVLFSSSIQEERDNEYGRSKSDGRKLLEEWAVRNGSSFTGMVVPNVFGPFGKPNYNSFIATFGYKLTHGDSPTVLQDNEVNLIYVGSLCRHICDKIREMGSRTVPSLVERDDVACDFEMKVSEVLGLFENFKKLYFEQGIIPPLNNIHEMNLFNTFRSYIDMESYFPVKLVQHTDVRGSFVETVKIGVGGQVSFSTTVPGVTRGNHYHTRKMERFVVIKGKARIQLRKVGTDEVLDYYLNGEEPAYVDMPVWYTHNISNIGDEILYAQFWINEWYDPTDSDTYFEPVVKDEMKRLKVLSVVGTRPEIIRLSCVLQKLDASPAIEHVLVHTGQNYDYELNEIFFQDLGLRKPDYFLNAAGNNATTTAGQILINIDPVLEEVRPDAFLVLGDTNSCLCAIAAKKRHIPIFHMEAGNRCFDQRVPEESNRKIVDHISDINLPYSSIAREYLLSEGIPSDRVVKTGSPMYEVLNRYLPQINASSILENLGLEKGKYFVVSAHREENISSERNFGNLVKILNDIAQTYGFPVIVSTHPRTRKKIETDGVDFHSLIRLMKPMGFSDYNKLQINAKTVISDSGTISEESSILNFKALNIREAHERPEAMEEASVMMVGLNPERVMQGLSELQNQNLETRNFRPVADYSIPNVSDKVVRIILSYTDYVKRVVWGERMKGKRCLFLTNYFYPEVFRGNDIAFEMVKRGYEVTVITCIPNYPQGHFYEGYGLRSRRKEVVNGVNVIRVPVIPRGDGRAIRMVLNYLSSLLFSCIYTLSIVCRKRFDFIFVQELSPAFIGIPAVLAKKIRRIPIYFWLLDVWPESLAAGGITNKYIVKIVDRIMRYIYRHCCKIFIAASGVRTLLQQRGVKNDCIEDLPNWGEDELRKCTVDDDELPHLPDGFKIMFAGNLGEAQNLENVMRVAERLKNNKHIQWIFIGDGRKKKWVMSFVQSREMGDTVHFYDRYPIEYMPAFFRKADIMLLPLCDNSAFNVTLPAKIQAYMLSSKPILVMANGEVQTVVKNARCGYYTGADSIDKMVRLVLSISNYSNQELEEKGRNGYNYYQRHFKKEKCMNNLFEIIEKGERSNVMRRENEVMSEILIDHVLLDRVTKAAKESPRLRMNYNFHESLSSPSQRLLNALELGTVLPIHRHRHTAETYVLLRGRMRVLFYDDDKKEINRYELDPAEGTYGVNIPRGQWHTIEVLCAGTVIFEVKDGPYIPIAPNDMLEMIRTITFLYQWLIAMPILLIITILTALTTLIGCRLGNGNFWGYYPAHIWSRLFCILSLVKIEVRGRENIDKNTSYVFVSNHQGAYDIFLIYGYLNHNFKWMMKKSLRNIPFVGSACAAAGHIFVDNSTPGRLKETLQKAETTLQNGMSLVVFPEGARTWTGAMRPFKRGAYQLAVEFSLPVAPLTIDGAFAVMPRTTYNFKPGKIILTIHPPIYPQENKGHDIEDLMKKSYAVIESALPLKGMEERLRILLCEDDENLGMLLREYLQAKGYAADLFSDGESGYKAFLKGKYDLCVLDVMMPKKDGFTLAQEIRTVNGEVPIIFLTAKSLKEDILEGFKIGADDYITKPFSMEELVFRIEAILRRVKGKKGKEVTMYKIGRFTFDTQKQVLAIDDKSTKLTTKESELLSLLCAHVNEILERNFALKTIWIDDNYFNARSMDVYITKLRKHLKDDPSIEIINIHGKGYKLIAPDVEAKTKMKKSTIWLLAVIMALTFIGLLYVQIMYMENMIKMRNEQFTEAVKRSLYAVSTSLELDETQRYLDEYLEEEEKKMLSSYEQKQDKQDIASTHHQFSIVSPDGTVASFSFREQTSTIITPAAPRQKEHNTLISTYRNMQEARKGQYLYQKGLLNEVILNMLSKASNRPVMERIDIKKLESYLKSEFENNGLNLPFQFAIYNKNEKIIYSSNQYDPKIEGNLFTQAIFPNDPPAKINYLKVYFPTKRDYISSSVKFMIPSFAFTFILLVTFLFTIITAFRQKKLTEMKNDFINNMTHEFKTPISTISLAAQMLNDPSVAKSPAMFQHISGVINDETKRLRFQVEKVLQMSMFDRQKTLMKLHNVDVNDLVAGVMSTFKLKVEKYGGVIDADLEAEDAIVSVDEMHFTNVIFNLLDNAVKYRREEEPLSLFIRTRTVGDKVEISIRDNGIGIKREDLKKIFDKFYRVSTGNRHDVKGFGLGLAYVHKIITDLKGDIRVESEINQGSTFIITLPLIKNKMKVYQSHEIKNIALLGSKGSGKTTLAEAMLYECGVIKRRGTVEGKNTVSDYFPVEKEYGYSVFSTVFYAEFLGKKLNVIDCPGADDFVGSAITALNVTDTGVIVIDSQYGVEVGTQNIFRTAENLNKPILFAMNQLDGEKADYDNVINQMHETFGNRIVQVQYPLSCGPSFNAMIDVLLMKMYSWSPEGGTPTISEIPESEMEKARELNQKLVEAAAENDETLMEKFFEQGSLTEDEMREGIRKGLITRSIYPVFCVSALRDMGVRRMMEFLGNVVPFVSEMPKPENTAGEKIAPDANGPTSIYCFKTTVEPHIGEVSYFKVMSGTVHQGDDLINVDRGDGRERLAQLFCVCGQIRTPVEELVAGDIGASVKLKDVRTGNTLNTKGCDYHFDFIKYPAPKYQRAIKPVNESDAEKLSEILTRMHEEDPTWQIEQSKELKQTIVSGQGEFHLRTLKWRIENNDKLAVEFIEPRIPYRETITKASRADYRHKKQSGGAGQFGEVHLIVEPYYDGMPAPDTYKFNNQEFRMNVRDTQTIDLEWGGKLVVCNCIVGGAIDARFIPAIVKGLMDRMEQGPLTGSYARDVRVCIYDGKMHPVDSNEISFRLAGRNAFSEAFKNAGPKILEPIYDVEVLTPADVMGDVMSDLQGRRAIIMGMSSEKGFEKITAKVPLKEMSSYSTALSSITGGRSSFSMKFASYELVPSDVQEKLLKAYEAEQTDEMAGLYIHIPFCASRCVYCDFFSSTDFSFKRGYIDAVCRELELRIHELRDKPVFTVYLGGGTPSSLSPSERGRLFRTLSTVVDWSICKEVTLEVNPDDVTPLFISQLKDTPVNRLSMGIQSFDDSDLVFLRRRHTAHAAMEAVDNCLCAGYENISIDLIYGLPGQTVERWTNNLRQAVTLNVPHISAYNLIYEEGTALWRMREKGLVKECEEEESLQMFETLIDVLGFSGYEHYEISNFARSGRYALHNTSYWKGVPYLGLGAAAHSYDGKSRRINPSSLSEYMEALQTGHVAYMEEKETVDSLYNEYILTSLRTCWGLNLKKLEDDFGTERMQYCLEQALPHIRAGRLVVTDNIMRITRKGLFTSDDVMSDLFWVDMNRFHYKILSVFIISLSLFTFPTNAKEYSSEIGTLWNFTVSKQINRINLQIQQNVWTLGKYYERYMPIAVVSYTAVPKYLKLNALYYYMNQQTAPNIYKNRHRYQLGATFSYPVHRFSLSLNSRFESTYTIGTAKPSNKWRNKILLSYTIPDSRWTPFIHTDIFLFLNGKQSGELDRIWYDAGVEYRIDKKNSIECKVREEHLMSKTPQQLNTFISLGYKLKLMKIVLLVVGKTVESHFIQGIEEYSKRLAHYVPFEIAVIPELRNTKSLSTDQQKEREADFILKSFLPGDYIVLLDEHGKEFTSTQFATYLEKKMSNVAKRLIFVIGGPYGFSQRIYNAAQEKISLSKMTFSHQMIRLIFTEQLYRAMTILNNEPYHHEMKKALNIDQQIAKLKSHGMEFDNEEKAKEILLDIGYYRLGFYSFPFETTFPRINNRDHKLKKGTTFKSVYDLYEFDTKLRRILLNALDRIEVNIRTQIIYTVSNYYTDSPTWFANPDIMKSDFISNFDIMVYKAMQDNPIIKRHHQRYPDDKYPPAWKTIEFMTLGNIVSLYKSIKSERLKYIIAQHYGCSTGVFINYLDTIRVIRNRCAHGSCIYNISIPIGIKAIPANIDRDSRHNINGVIAVIKYILGTISKNRKEDLNNEIISTFKNIQSQETKKIVADCTKIIIMKTKERLIDELIDLAFAEDIGDGDHTTLCCIPDTAMGKSRLLIKEPGILAGVEIARKIFHRFDPDLKMTVYIEDGTAVKPGDVAFVVEGRVQSLLQTERLMLNVMQRMSGIATMTHRYVKKLEGLHTRILDTRKTTPGMRMLEKEAVKIGGGVNHRIGLFDMILLKDNHVDFAGGIENAISRCHDYLKAKGKDLKIEIEVRNLDELKEVMRVGGVDRIMLDNFSPELTKEAVKIVGGKYEIESSGGITFDTIRDYAESGVDFVSVGALTHSVKGLDMSFKACMKKFLFLVILSLTLLSCEGPMGPQGPQGVPGEGMFWKYYTYTVKSQDWQLVTSPDGLNTYYMYEFQNKDITDDLYIDGYVLGYLVQSPGADNEVITPLPYTIHKGEANGDNAMLWTETYTYDYMPGSVAFYVQYSDFIEQQPGDMVFRLVLNNMAERNSPLILGTEPIGKLLIQYSVPAIIAMTVTSLYNIIDSIFIGHGVGALAIAGLAITFPLMNLVVAFCTLVGIGGATISSIFLGQKDKVRATEVVHNVLIMCIINAVCFGGLTFLFLDSILLFFGASHDTLPYARDFMQVILLGTPITYVFIGLNNVMRATGYPRKAMFSSLLTVGCNIILAPIFIFSFDWGIRGAALATVVSQTVAMVWVLVHFANKKNFIHFDSRYSRLKVRVVAKIFSIGMSPFLMNVCACVVVIFINNALQHTGGDLAIGAYGIVNRTLMLFVMIVMGITQGMQPIVGYNYGAKQYDRVRKTLRYGITAGVVVTTVGFVLSELFPHAIVAMFTTSEELVDLSVTGLRISCAMFPFVGCQIVISNFFQSIGRAPVSIFLSLSRQLLFLLPLLLILPTYWSTNGVWLSMPISDFIAFVIAVMALWIHQRKIRQKFQTVQSMKKRLTIALVAHDNRKADMVEWVKHNAELLSHHHLVCTGTTGRLIKEAFDELNIPADVTCMNSGPLGGDAEIAALVVRHQVDLAIFLIDDLNPQPHEADIQMLLRQCRVHNVPIACNRYSADLMITSTLWDDDSYKPTEPKYTYFQRMISYLQIENLTKSFGDRILFENISLGIGEGDRIGLIAKNGAGKTTLLNILAGKENYDSGNIVFRNNLRVGYLEQSPSYPPELTVIQACFQSDNDTVRLIAEYEQALQTDDPIGLQELLDRMDHYKAWDYEQRAKQILSQLKINNFDQPVKELSGGQLKRLALANVLITEPDLLILDEPTNHLDIDMTEWLEEFLRRTNITLLMVTHDRYFLDRVCNQIVEIDNHTLYNYNGNYSYYLEKREERIEIHNAEIDRARNLMRTELDWIRRQPQARGTKAKYRVDAFHELQAKARQEKSDGQVRLEVKSSYIGSKIFEAKGICKKFGDLKIIENFDYTFARYEKMGIVGNNGTGKSTFIKMLVGEIQPDRGRFDIGETVKFGYYSQDGLHFNEQMKVIDAVRDIAEEISLGDGRKLSASQFLQHFLFTPETQHSYIYKLSGGERRRLYLCTILISNPNFLVLDEPTNDLDIVTLNVLEDYLRNFKGCLIVISHDRYFMDKVVDHLLVFKGNGELKDFPGNYTDYREWKETQEQKAKSEQAEKAKQDNKKTTAEKRNTSDNTRRRLSFKEKKELEQLEMEIAALEEEKKTIETNLCSGTLNIEELTLQSKRLPEINESLDEKTLRWLELSEIEGMEKIFLLPNGFKKVGWIILVPTFVLGVLMTIDGYNGFPSFLLPEWIPLAMKRVLTSDWVGKILNNVAIIGICLGCLFVACSRERVEDELIGRIRLNSLLIALYINSSVLIILSLFCYELLFLNVLVFNMFTNIIIFLIVFEMKLWKLKKSLRDEEMERAELRITQQHLADVVGVSRQTINAIETGKFVPSTVLALKIAQVFNKSVEQVFQLEPSDMLQKIKERILAGGEITPDEALELAQKAIRSDLYTAADEIRKKFCNKTLDTCSIINARSGHCPENCKWCAQSAHHHTQIETYDAIPIHEATSIARLNEQQGIKRLSLVTSGRRIKASEIDYFCDIYRKMGEETHLHLCASMGLLKREELEKLKAAGVKRYHCNLETASSYFSELCTTHTIEQKKETIRTAQELGMEICSGGIIGMGENMKQRIELAFELKELGVCSVPMNILNPIPGTPLEHMPPISDEEILVTIAIFRFILPRTFIRFAGGRARLSRETQKQALSAGVNGLLMGDMLTTLGSGVNEDKSLAREAGYDPLMKRFAFYLLPILLCFAVGLSASYFQSDSISEWYPLLNKPALTPPNGVFPIAWSIIYICMGLSLGRLIERDANKTLSVLWGIQLVVNFLWSLLFFAFRNPFLGLIDILLLDILVWIYISRAYRKEKAAALLFVPYFLWLLLATYLNGYVYLYNMEITHDLSRKQFQTVADGKTAYVSYDLVDGCLNIEHTIVPREIEGRGIAAALVKAAYDYALDHDLLPAATCRYATVWLDRNPQYKDKVSSMKMDEKDKKIARLEELLQSIKDNIDETESVLDSLSNSELQAENDNDLPDDEFDRLLDEFIQSQLSEEETEDEEESDNSPSNTSHHIIFKNTFFSICDTKEQIPRDSLRTQFSVDEGEYLFISTECIGQNESATIDAWDETFLAELIAPDGSSYIETQISMPIDTENYASPSAYFALPERENREGSWIYCLSRLSDKEEYTTKSATFISLPQKYDECFEVNNYLLFKNESIAPDPDRPIISYTSINPSIHSNYYIGFCGISKLKDTDKSYEYEIKIRTQTGLTKYETVGTFISQDDEERNRLWTFQEPVDFSDYENGEYAVEIYFLGEKVLNAPFRIGNEEEGEYNLFNIQTRPPIGEKKEIDPTKEKDAMNSLQEMIGLNNLKQSIAEHLNYVKLLAARKRAGLKASIPPLHMVFTGNPGTGKTTVADFIGEIFHKMGLLEKGHVIRTDRSKLVGKWLGETEQKTEAAIEAAKGGVLFIDEAYSLFTNDKDGDKRDFGNRVIETLLPKLSDDNFGTIVILAGYPAEMKLLLESNPGLQSRFPFTFHFEDYSPEELLEIADLTIQREGYEITDSARQTLLELIKKDHRNRDRHFGNARYVNRLISSKILPAMATRLAQSGIYDSGNPDKRSLVTIEQEDIPDNTDEKIIISSEEFDERTIDECLARLDRMIGLSNVKAAIHNFVKIARLLHENGKNFFGEIPLKWSFAGNTGTGKSTVAEIMSDLLKAMNILGNGQFIEIKGEQLYNVPDYKVDEVLQDAMKKSRQGLLFIDGDSPKFKNAYNTFDSEQLRIKLAGYTSAMPGAHALIIAENRAPRQDLVEQLIDNGAHEVDHTLIFEDYTSEELFEILKQMLSDKDFSFEQKAESIMQHYIEYLCSDQYSCYANARTMKIISRTIMQNAYLRLGEAGIKFSRNRITHADVACFEIDERQTLRNRIGFCMFSGMSLWGEDSYLSLKRQIGSYRINSISLYFASHVIKNGINFQILSRFMNAAKYIRYILTIATALLFFSACKDDKNESQPTDFILRVDESVSIKLPNSTSYTITTNNSAISYELSGKILTVTAIKEGKATLTVILDSGESHNYSFTISANSYQMGFTIDSTPRIESWISGSTVKTEETAGLQVSCEPGMDITGSPTDKSVRSYGFTYVETGKLLRFSAQGDFSQKGILNNGIMATRDNDNTPIQYEACTVSIEKVNDAGKIWFTLQFTDRSDIRIVTEIFMIFTAICGSIFSLLADMPRDYYPNSLEGKNGAELKTELHNLLKNHTRLPYGSYDYNRIACTWTVFKKSDVRPNGKVWDMYSNNSYSFSSGATKGMNIEHSVPKSWWGDAANYNGTNALTRFKYDGSYDLHHLTPSDADANMAKSNYPLGVVDSPSFDNGVTKVGTGQANGRATNLFEPADEYKGDFARMYLYFVTCYQDYSWKSSALSMFAQNSYPTLNAYGQSLLLKWHRQDPVSQKEIDRNNAVYSFQGNRNPFIDYPNMVEYIWGDSTNYEFSFSGQSTSAPSISISNDKIEFGYIGTETSKDKETYIKGKNLTTDITAKLLNNDSGDFSLGMSNLPAHELNTTGINLAITFSPRSIGTRNVTLRLSSDELSAPVDITISGTVLLSDASYLRIIDIKSTYKKSDEPVRLMLNMNLDTQWTVDGKPATHLTPSELSAGLHTIQFTTTYGTGKMRVQIIEMEQPSLLFVLGFLIVWHSFFSIYIVDIISIFGFFPHKYCRKSDTFVAYTYIGKRYFNGEEMEKNNTQKGIVQFAMEAGAYMGLYFVVKFIFAVLSLNYPFCNVVSTIMLLFVPLVVFFMMRRFSNQNEGGSYFSQLWMMGILLFFFASLISGLAQYIYYVYINPEYIKSQLSAAVTLLESLNMTSDPSLLEAVKTGLEQGNIPSPMAVVIQQMWVNVFFGSLLSAVMAWLVSVWFKSSKTKKMDISVIVPLYNEAESLPELTAWIERVMEENKFSYEIWFINDGSTDDSWQVIESLREKNSRVKGVKFRRNYGKSPALYTGFQRAEGDVVITMDADLQDSPDEIPELYRMIAVEGYDLVSGWKKKRYDPLSKTIPTKLFNATARKVSGIKNLHDFNCGLKAYKKEVIKNIEVYGDMHRYIPYLAKNAGYNKIGEKAVHHQARKYGKTKFGLDRFVNGYLDLITLWFFSRFGVKPMHFFGLLGSLMFFLGLISVIVVGANKLYCLYNGLPYRLVTDSPYFYLALTAMILGTQLFLAGFLGELISRNSSERNNYQIETEFKMSGLKGNECSDLLTLAKARGSVRSFKSLKVERAKLEYILEVARLAPSAVNFQPWAFVVVRDPEKLKALYDCYPREWFASAPMCIVVCGDHSTSWKRLSDNRDFCDVDIAIATEHLVLAAAEQGLGSCWVCNFDVQRCKKILNLPDLWEPMVLLPLGYPAEGVETERKRKPFNDVVRWEDFMGRLLSFIEGVLFLCAYCLVLSNCGSNGCVDNRSSIPLAQFYSYDAQETALSVDSISIFGIGQPTDSMLLDSAVAVTQVYLPLRFTQDSTQYVIHYEQQGLSSPRYNDTLTFVYRSYPYFVSIDCGAMYNFVIDTCRYTRNILDSVSVTVPEITNKNVESIRIFYTVQTQTPDEEMQTDSVVAEPEEPEIKGYLYPLFNGLSVNVNILDGIANLFGQSYGNYEIAAELDLHNRFFPVWEIGIGHADNTPEGLNFTYRNKASLYNRVGMNYNFGYNKTAMSFFYIGIRYGFSFFTYDIDNILVESPYWGESEKLQITGQKSWAHWGELLGGLRVQVYKNFYMGWTVRYRLMFSHKKNTYSQPWYIPGFGTDSSPFGFTYTVGYRFSFGKKEKKIESQPVAEMGMLESIEKILHDVADLFSANTEAGHNVVYVILIVLIAILCDALCKLLINRLLLPIIRRTKFEWDDHLYDKKVVSRLAALAPAFILYAFLPSAFDIESSWYILTDRICKVYIIALILRFLNGVLNAFLDIFNEKENLRHYPIKGGVQTIQVILFSIGFISIIGTIIDQSPARLFAGLGASAAILMLIFRDTILGFVAGIQLSANNMLHKGDWITAPAYNANGIVQDVTLNTVKVLNFDNTTTTIPPYALVTGSFTNWRSMFEGGGRRISRQILLDINSISFLREEDLLRFKDHFLIGEFVVQRLHSIQQACNSGNSFLAEELRVTNSMLFRVYLENYIRQMGKSNPDMLYMVRYLPMAERGLPVELYLFSAEKTWKMYEAVVADLIDHTIAVTAEFGLRLYQSPGSYDIQCLRERVNQIMISKYIIRALYKKYSKPPRNFSELNIDEFVSICGDSYGITVDDVSMTFGQMSEDNPFRTILLRNIYGIEKFEYHMALVSSSYILFFSRESCDVTVHFKPESTSWLKRFCWWVKFRLLHLNMKSQEKLPRAMADYGKRFEQGLEQMSPFEIKNDLISYAKECDQKAVCQFLNAGRGNPNWINTVAREAFFLLGTFAVEEAKLTFELPEEGIAGMPQKEEIAKRFENFLKHHEKTPAAHLLNESVQFLTKEGINADDLIHEWVDGIIGDQYPDPDRILKYTELIVEKYLIQEMCDRQTPPDHYDLFATEGGTAAMCYLFNSLKANKLLSQGDRIALMTPIFTPYIEIPQLKEFNFDVVNIQASQLTKEGYHTWQYPENELDKLKDPSIKLLCLVNPSNPPSYSLDEATHKRIIKIVRENNPNLMIITDDVYGTFVPHFRSLMYELPYNTACVYSFSKYFGATGWRLATIAIARHNVFDAQIALLPEKQRKELHDRYDSINLNPDKILFIDRLVADSRLVALNHTAGLSTPQQIQMSLFALFSLCDMQDRYKNKLQKMITNRLTAMWEKTGFKLLPDSLRAGYYSEIDIMVWATQLYGKDFAEYLEKNYEPLDFVIRLAKEAGVVVLNGDGFDGPRWSIRVSLANLDEMNYRKIGTIIGHTLEEYAQKWKNETAKKEPVIYMDIIIHFFRSYPEMAIFLTLGIGFWIGSLKYKNFSLGTVTSVLLVGVLVGQMNIDIPGPLKSVFFLLFLFAIGYSVGPQFFQSLRSDGIHQVIFACIFGIVCIGSTYLIAKIMGYNAGMTIGLFAGAQTISAAIGVGTDTIGTLGISAEKQQEWLNIIPVCYAVTYIFGTIGSAYILGTLGPRLLGGLEKVKNDTRALEKELKQDNEENDPALMNANRPVVFRAYKIESDWFKTPQTVKEIEKHIKEMGRRVFVERVRIDGEVLDITPKTVLKQGDEVVLSGRRETIIEDESWIGPEIFDPELLDFPVEDIFVLLTNKELHKKTVRHLRSLPCMHGIIIKQIKRSGVEIPVYPKTVLYKGDTLEIVGLKREISETAPTLGYVDRPTNKTDMIFVGLGILIGGIIGALTIHLGGVPISLSTSGGALLSGLFFGWLRTKHPTFGRVPEPAVWIFNNLGLNMFIAVIGITAGPTFLSGIREAGFMLFIAGVLATTIPLLLGLLIGAKVFKFRPAINLGCCAGARTTTAALGAIQESLGSTLPAMGYTVTYAIGNTLLILGGVVLVLLSAMVKIMEIRLPHYGRGYHLITQELLSRLPQLPENGLLNLFIKHTSAALTINENADPDVRLDFAAFFDRIVPDGASYFKHIYEGDDDMSAHIKASLLGASLTIPIRGRALDLGTWQGIYLCEFRNGGGARRVTVTIVEMIYKFRIVSDEVDNFKREICIDSDASFLELHDAILDSVGFSKDQMTSFFICDDDWEKKTEITLMDMGKDSDEDTWIMASTKLSDLIEDEGQRLVFVFDYMTDRMFFMELKEIEPGKDLETPVCTRKEGNPPQQTMDFEELEKKNAANNSSDFDETFYGDETFDPSELDEEGFADLNMDDEYNNMMKKIFLVAAMAAVVLTSVNAQNKYKPENMSFSTELNYSPGGATTDGQFSLPDYGAKVRLHLNEKMAVRLKLGLNTSTDKDVTYYESPTDQKEYERNSKESITTFSIMPGFEYHFTKYERISPYVGGEIGLLTSTAKTKTDNTENDDKTETKRPGLGFGVNVFTGVDVYLCKGLYLGFELGLGYDSMNYKRGTTTTVSGSTTTETDGTTSNLQSRFGFHATPSLRVGWNFMSLGTFLTNRKHNLHYNISNGLIQQTTSYELSMVVPETGGLGLRLSFMKQPLAYVHPDAKIANNVVIEPFVTIDKNVIIGEGTQIGSNVTILEGARIGKNCKIFPGAVISAIPQDLKFQGEDTTVEIGDNTTLRECVTVNRGTAAKGKTIVGSNCLIMAYSHIAHDCVVGDNVIISNATQVAGEVIIDNYAVIGGGSLIHQFSHIGAHVMVQGGSLINKDIPPYIKAGRNPISYAGINSIGLRRRNFSNETICNIQEIYRYLYLSDMNNSDAIERIEAELPATKERDEIVLFVRNSKRGIIKGYLMKQKTLKNSFSVSGKGLHTGLNITATFLPAPENHGYKIQRVDLEGQPVIEALAENVVETSRGTVIADGDVRISTIEHAMAALYAAEIDNCLIQVNAPEMPILDGSAAVYAEEIERCGLEEQNAEREYYLIKSKIEIHDEETGSSIVVLPDDEFSINTLISFDSPILNNQFASLDDLHDFKKEIAGARTFVFVREVEPLVKNNLIKGGDLDNAIVIYDQKTSQTELDRLADLLNVPHKHVDELGYINNKPLEFENEPARHKLLDILGDIALVGKPIKGRIIATRPGHKINNQFARLIRKEVRRQDIQCPAYNPNKEPLMDVNRIRQLLPHRYPFLLVDKIIEMGTRHIVGIKNVSGNEPFFQGHFPAEPVMPGVLLVEAMAQTGGLLVLSTVDEPERYSTYFMKIDNVKFRQKVVPGDTVIFHLSLMTEVRRGCAYMKGYAFVGERIVTEAEFMAQIIKNKMKFSARQIAEFLHGELVGNPSVEVNNLSKIEEGTPGTLSFLANPKYTHYIYQTHASIVLVHKDFEPEHPIEATLIKVDDPYACLAMLLNLVNEATIAKRGIEQPNYVSSSVTLPDDIYLGAFAYIGERVKIGKNVKIYPQTYIGNDVVIGDNVTIFAGVKIYHSCVIGNNCILHAGTVIGADGFGFAPQANGEYAKIAQIGNVVLEDNVEIGANTTIDRATMGSTIIKKGVKLDNLIQIAHNVEVGEHTVIAAQAGIAGSAKVGSHAMIGGQVGVAGHIKLGDRIQVGAQSGIPNHVENDAVIMGYPAVPSKEFARQVVYVKRLPELTRTVKALEREIEALKEQLKNKMQEKLSKYDAPQKAKALGVYPYFRKIESDQDTEVLINGKKVLMFGSNSYLGLTNHPKIKEAAIAAIRKYGTGCAGSRFLNGTLDIHEELEHRLAKFVGKEEAIIYSTGFQVNLGVVSCVTGRGDYILWDELDHASIIEGRRLSFSTPVKYRHNDMQSLEDQLRNCNPDKVKLIVTDGVFSMEGDVANLPEIVRLAKQYNAAVMVDEAHGIGVFGRDGRGTCDHFGVTDDVDLIMGTFSKSFASLGGFIATDKVTANYLRHNSRSYIFSASITPASTAAVGAALDIMESEPERIANLWDVTNYALEGFRRIGCEIGNTCTPIIPLFIRDNEKTFRVTRDLFDEGIFVNPVVSPAVAPKDTLIRFSLMATHTRAQVDVALEKIEKCFKHLDIIKMKKLMILTTILMALGISTACADNDKPIAVTQLPQKAQLFIKTHFPKEKVALAKLERDFLETRYEVVFTNGSKVEFLKDGEWKEVECKYSTVPTAIIPAQIASYVSQNYPDTQIVQIDRDKRDYEVKLTNRLELTFDLNFNLIDIDDMKLIYRIALRLSLILIPLMALWATLFYFMMVEEINDEADDTLEDYSELIIIRMLAGRELPSLNSGSNNSYSITPIDEAYASSKPHIEYYDAEVYIPEKEETEPARILSTIFLDNDDNYYELKVAIPTFEKDDLVRTILFWIILLYFVLLITIIGSTIWIFHRSMRPLYALLHWLDNYTPGRHNAPVPNDTNISEFHKLNVAAQEAANRSEELFEQQKQFIGNASHELQTPLAILGNRLEWLLDNTELNETQIEELFKMQRTLGHIVRLNKTLLLLTKIENGQFPESTNIDLAFIIKEQISLYNEIYSSRNISYTINIPETFIVLMNESLASTLITNLLKNAYVHTTQNSNIEITLINRTLTIANDGTTPLDTEHIFERFYQGSKKEGSTGLGLALVKAVCRYYNLHIEYQFKESKHYFSITWPMKILIIEDEPSLREIMQRALVQERYVVETASTYSEADAKIAAYSYDCILLDIMLPDGNGLQLLKHLKELRKRENIIIISARDSLDDKILGLDMGADDYLPKPFHTAELLARIKSVLRRGKSGGEMALILGNVSLEPESSRVLVNNKELSLLKKEFDILFYFMQRPNHLVDKSVLAEAVWGDHADQADNFHFVYAQMKNLRRKLIDAGANIEIKAIYGFGYKLVPPIEMKKYICTACEWVYDPAVGDPDGGIAPGTPFEDIPDDWVCPVCGLGKDAFEEVTEMTKGFYQQLHSGYLSKKMNKKKDSLQQGIKPQKIMYMKNIGPELNRIMTERRIVRKDIAKEVGITPTYLSAIVRKNSIDCELLDKICKAIGISASYFFDDTHGNHVSDISATTLFGNANVNITQGEVKMLKELLAEKERTIKILMAERNIDRAENESKIMEKRTKDSIALSEFLSTFSSNECTVAIDKIVEGCLVPRRTVYNWKYGVCRIPELYKLKIEEIFGQQIFSRPLICEKMDELFTVSIEFFIFNDELWYRSEGKSPCRLKEQDYEFVTLIANLIEKFYPKAYIALASEYAKSKANLPLFRYRIVSRFCRCNFGNIDNIIDIDASTFHFEHVLCPLRGECKFENIVCHPEFESHISKAEKRILERWYRGESKEEIADALFLSIHTINNHIRNAFQRLDIHNKAEFVRFADLNNLFKMKKYNKFDIDRVKSAADIRDFIPGLSGRGATQYCECPECHKSGRNKGLCVTHKTNMDIAKCFSCGFTINGAIDAVQYYDKVEFIDALQIVASRYNILLETEMEKRQRAIDRSREKVKQSFCLSQLEASGLTVKDVTAKVRLDDKSGEIYLPAFQRGGMDKYFNINKNDDEMLIYYYDLWGNPVQYATRGAAGSLKPYVRIRWSNPSLHLDKDGREIKYQTPKGAPTKFYIPQYIRERFLSETHIETLIVQEGEKKAEKACKHGIASIGIQGIYNIGNAETGLIQDLQYLVQKCTIKNVVLLMDSDWDHLHREIQIGDHVDQRPNQFAKAVIKFKQYVQTMHNIGVSVDIFFGHINDTPSHDKGIDDLLCNTLKGREEVLRKEIDTVMHTHDGKGQFLDIHKITSKTDFQIKDFWLLNDRDGFFERHKEELLQIPNFRFAKINYRIEDGKLVQASRYSSERDFWVIGANDKGKKTVDFDYIEALQFISANGFYRIHTSDLEVDQYKFVRIDDGVVHLSGPIEIRDFVYYYALQTCKDRDVITMLASRLGSLLGPDKLERITKIDDNFDNFEPHIQRMYYRNGQIQITSRGIEFGDLLGQVWSDKVIRRKFKRVPVIDKIEYDPAAGFSVFPTEEGKACEFFRFICNTSNFWNIPGHTPTDQEEREFQQHVVNKITSIGFLMCDYKYQTELKAVIAMDGQMGEVAQSNGRTGKSLVGAALAKILDQTAIDGRNTKNDDDYIYSNVTPRTRNIFIDDVKVNFDFERFFFAVTGDLAVNPKTKARFIIPNEKSPKFYITTNHAINANNRSALERITYMAFSDWYNDNHRPIDDFGHQFFADWDEDQWNLFDNFMAECCMFYFKSMAESWYRTGQGAVPPPMRDIKMRTLKQQMGEAFVQWAETYFDESANNLNERIPRKTMYDAYHSSFPDSKFGVTPSNFRTKVVLYCDFKGYHFNVSRPNKSGISFRDWIEDHPGEAFVGEADKSGGVEYFGVFSLDFAKKQPFMSVNFNPYENYRIRVFENSGELRNYKKDVVVDNRRERVVLLIGQVAPDKFAIGYDIFFADGRRAGRLPSLEFGYFVWEREAKLYFLGYIKQNRSRFLPSTIEAVDDLIRTIIQPGLFMSGSFSPTPPSLRMYGKVLRCKEYGKTLKNSAKAMYVYIFFFLFMSQYYVYIHLEKYLAEWLLHQFGQNGQIRFPRGSAENDILEYSLTTQPADIPVPLKSPDSLAIEIPYFKTKDPRYYNFLPPRAKKALERTIYIRFRIELWNELHTFDSLSHNLSDLIWTFMEKHEIADDPKSWETIRQMYFRMRKTYQKKQQRNATSSKEEFNNAVQNAQMKQILPGILRLQVVDCSLLPPNVSLKSKANLPISVLADTTEISFVGSPKCEYNIKNDNNSTSEKTILEFLTDEYFPFDEQNVAFIISCASGKSYLIGARESPFPVVNVKEIIGPPSGDSAGFQVEVSWVSIKSLIPLILMAKKFDLKLKGYVGGYDFDSNYVEYILEKSESKEVNVLIDSLGGSVASAFSICEAFRRHGNVKVHYVGMNASAATIASLGAKHISIATSGMYLVHKCSTVITKWASLNADQLRQLIEEYDKQKKDMEKIDLNIAAMYADKCKKDKQALLDLMKVGGWLTAQEALDWGFVDEICDLPGDVTPKVTAQVIEDLSEAGIPLPFSVPERNDSRVDKIFSLFASFFRSNTQHQQSSVTMNKKFQSIIGCLEIEAIEESDGKFHLSADLMQKLDSHLQEMDSKIKELKETISQKDSELEALRKKPADETKHVVDDKSAEKEKSPFESYVENVRQAKDLFNQIPMAHNISFSDEEYQKAAEKWRQQLLLLPMLSCKDSLRFMTGIPGIRNKEHVGTAKSNAQFGPYKADKNSSSTTEVKYRELETFFGNVCEDFEPNSVVTMLLGQNASFLGEGQKTAPSAKLVIASVLKSLGESLHNVLFTAKRNAEGDTSADLFNGFITIADAEVTAENISEAKGNLLKITTGFSEADALDVAKSIERKAHPVLRATEKFLYCSPEFADAYNDAYMLTHGGIVYNKKFEQAVVEGSNNKTTLAPLTCLAGSSKFFLAPKSNMLYGYDSLSDQERIQVDRFKPFMLTLSAAMFFGVQFYSIDPRMLLMVDVTKQGMMENCLNIQKSLGWCQGTPVLPGVRRRLYYLSKSAILKWPTLPRDENGRATSAELTGDFVLAADAKWKYIDHLPDKAQLTSEPQGEVPSQTQLNKLTVVHPGVGADASAAAAYINNNDNVFLVQDMADNWRLVGCERWQTKSTVSQDLGQGPTGTTSTTVSVEATDETPAPFYKGKIEAEEGDFMADGSEIPGEMDDLWKGLLNDVPENKRSDTLDRSVSKERRYDMEGIKNRQMDKKLTESLQKWLSTPREERDYEQGNLLLFRLSGNKIQYRNLVPNPAKHAEFITRNIQKYVNFRVQEFTHEQVKEMEKKVEKIFEKRLSIEENNPARDFKKGKRTDHDSLPEEIRALYVENLGIVQRMRDVQTKLRLISTEESPCPDSERYPFLKELISLDKQLHENWERYDRYVPQQGQESGNAPGSLSEESRKALRLVTLNKGKYAKKPTPELKARILEWYGLITDPAEKLTEELKRLGILEMPLPATIEICQKDLFTAEDELKRKYDEITVRRLLRLREMYAWAVANPDAKDRQFVEVLVSRHRISQAAAYSDLAIVKSMIPRIAEASRDYHRWRANEMLLETYQTAKKRKDTKTMERAASSYAKYNRVDIEDERAMPYDRIVVQPFTATDDPTVLGIKPIPNINEKIKEMLDKYRKETIDIEDIEFEEADLEEDELFGDGSAKMEAQNKVYFNAPQRLTQLIGANTTVIVAGRRTGKTDSIASPFVLRNMQRMPGSTGGIVVPTFKHGLTNTLPGLFAAWKRWGFAEGIHYVVGRRPPKWFAKPITEPADYEHVISFYNGSVAIIISQDRPGSSNSLTLSWVLVDEAKFIDYKKLKEETLPANGGIKSYFGARSFNHSLMILSDMPQTQKGSWFLHYKEKMDVELIDTIKATVFEIWRTKTRIRECKKEGKPIPKYLQSYLRRLDTNLNKMRSVAVYYKEYSSIENLQLLGENYIKQMKRDLTPKTFRTSILCQRIGIAKDGFYSSMREAHKYNASDFDYLDSLGYDFDPALLDSRADKDVDPFEPICIGMDYNANINWIVAGQPSGRRLNIIKSFFVKFERKIPALIDDFCTYYANHENKTVVYYYDSTALGANYAVNDQDFHWVVCHEFERHGWTVVDVYLGNPMRHDEKYLLINQGFAGKQRFMPFFNRQNNDDLILAIQSAGVSRGRNGFRKDKGGEKLEESEESLLEHRTDGTDAFDTLYIGCEKFPQNALYRYSSNGVAMLRTGREQKSSAPRCQAPETGCGRINAPHGTELYIDRWAQKMPTAMLANLVACFKCLTLQIMKKTVALPVSQAKEGRKTSALEKSLIRFFERELEVKFTRREMWRSVSFFARSLAFLEKNPHLCNAHHLNQATTFANFAVGIFYAQGDTYSSDPRVESLMASQPDLGDEQRESGTFLFPSRVLVNILFHLMLIKMKRTVVLPVSQAKEGRKTSALEKSLIRFFERELEVKLTRREMWRSVRFVASLFVLLLALSTGEPLLALPALALAAYAYRGVADITSRFTEKGGARMKSHTIEFTRDDLVVRITRYPAGEPGKSPSVEIEVESSGLPRSFVWFDREPQLFAFKEMLEEYIETFRPMKDDADDSMIVGLNTWFSDIIFTSAFPDLELVSDQNWERLELWAGERSIFSVYLCANENGLIYLTDLGQVMEQYMIENRLPFASFSLRESPERPEDPFRRDFVAVFSSYFWDDYAESFIAQNFLTTLSAKQISSSAYDMVAFISKKGENITVRHHVVFYADGILGTMDWENEGTEEKDIAQHDINVSAMNYEAEIQESYPDKEIKLLSFSVSVGPRNITYYVIDRKNLTQMFFINAFNVFELFEIQGVTTAKTTVERDTAVINRRETFYDRTIEKKYEVQTSALSSPVKDWVEQFLFSPLVKMFDPDADSINEMTEVLITESACEISNSNTELGKVKFTWKYADVYPRLNSIDRETKDLFSQQFEFQFKMAQSIHINTMREMLKAGDPVDITLWTKSGQIQHWRNCISLRYDFYKGVRRVKLLDSRQIRTVRDVCIFEINNLTVFLMSDFEPIDFTSIDDIPGINAKALFSSELSKTEFRETGDISPVSIGDKHRYMPWGADDQLPYDILELIERDETLSTCQMFNAEICYGSGLLYNTEACSEKVKEEIDSFFVGNNIPTNYLGVCQDFKYFAFCANVIILNGDGSKIIRLIRKEACYCRLGVADSNGRIDKLYYANWRKAKPMEDQVEIIDLLDLNAPLCDLMVRMGRMPGDDGETRMRTDTRKFAVLTKVPTPDNTYYPIPYYASLFRGRWYNIKRLIGLAKEAKLKNSAPIKYHIEISDKYWTGIFRAEGITDRAKQQARVVEEKKKILEFLTGVENSGKAWFSQVYTNPNGDVVHDVVINKIETDKEGGDWASDIIEAVNMICFTMRVHSNLVGSVPGKAQTNNSGSDKRELYTIAQALQKPYHDLLFTVHNLVIRFNEWKGAYPDCPFIMLTTLDEKNDAKTVTVNTSEIMIISNDFELRRFIPNVMSTVEGEGSLYEKIEPYMGLVEASLSDIFIGPEMLANPRSMPEALRNAASVYVANEAFRMAVPSLDLVLTPNGFGIVNNQNVVPASKERIERLMFSLAQMRDKAVSTMVIALADIDGYAETPQGEWFSSSLFLPLAGHLSGLVDPEKPMWDEYLRIRNIAEPLENEAADEFISPELMTRLRAAPFEKGSGYARLAGRVRRVIAGAIPGSPLDKRALTDLVNFIRENPDKYPEWHASRTAGLFDPPVFGNDKKSSGYWFMNRKIAITLPVSWQELTDRQLYYLYDLFLDNLSADQIKTYCFFLWGKIRIECRYDEHDYIVRHDKETFKVSRELIASAIHELDWIVEIPEYPVRISRIRKHAALPADFQGVEFEKYIYCDNLYQGYLSTQKQELLNEMAGILYNAPGIKTNAAEKLSTFYWFASLKELFSRTFPSFLRPAGSMTSENLLEQGAPLGRRLQEAMNAQIRALTKGDITKEREVLSMDTWRALAELDAQAKEYEELKKQYGKMESKSFNWDAADFFRRLTETNKLARSKNFKFCLVSSLEGFEEALARMQSSTAFVCVSDVSSGSTDLTNSPHTVRTKTVFFAVRHKIDDMKARMEAFDLQREIFRQFMSKLILESTRLAEDRIFIDQKIRFSEIDKYFFSGCACSFFNISVSTYTDLRLNADEWEMNGNNITEDKALEERAKFIGAFNGTMIDIWKEKIVDMDIIDTGSLLDSVAALPVRADGRFSEVVIVQCFLEYGLWQDYGTGREVWRGNPGDIYPGQKGRKKVRERRRWFSTKYYSSVMNLRDFMADSMGREFVGIVADAFNDQRLKKSTEFYKNHSLMGKLELVIESENISIYSPKFDGETMTEFEKFMFINRYLSYPQLKRDFDAIISVIKKMTDDCGARENLFRLEGGNIKAIPLCVSLRHKDRSVGTLRLYCIRISDKILVIGNGGIKRTDTFQEDPALLSIVNQLRQIEHQIFVESKKAHVNYYDFDKMKPIIETITIMKKIPLFEQCVANVAPEVMEEVNLNIDIANRIYDLLKAKNLTQHEFASRMGKRDSEISRWLTGTHGFTTATLAKISAVLGEPIVEVRRESKTKYIFITMPSYNSSLGISGNSYTSHETNTCVISYKNMTESNVNIQMRLTSVNEVSFMMSPGKITEEVLPENIKLGFSSQIQPEVENNKIALIFGIKYELEGDKVLECVYRFEFEVSGLAQFITIEDNDGITITYIMPHLISVAIGTMRGILVVKTAGTNLSKYPLPIIDPMQLTQTLSNPMLFLCFLLLFSKRTPIFALSSIRYRRRVFANFTVGIFYVHRLIYSSVPCGALMRPQPVSGARQRGAELFYSLPVFYMTGKETKKFRFPVAVHLDKAVGALTLHTGVGTYIISADRHKKCQRQSWRTSSPCQNVQHCKDGGSFREKQEIGRKKKYFATFHGGMKKTVVLPVSQAKEGRKTSALEKSLIRFFERELEVKLTRREMWRSVRFVASLFVLLLALSTGEPLLALPALALAAYAYRGVADITSRFTEKGGARMKSHTIEFTRDDLXXXXVRLQGDARRIYRDVPADERRHWRFMKPERMEYPTPYLRDAGFFCLFTIRHSSIFLRKNRNTMAQIDEIKSKIKALRAETEANSITPDSLGLILDDMASLIGSQNSGPIGVASPYIDITLKIEQGNLVLYPVEYLPTGADASTFEIRLMRHISTRDRNFDKKGYRKVAGWRIPQNVNNPESRFQFYRWPYTPGAATIISNTPDEIGGQVVEDKFPRVIVHYGRYKQEFIFTETPRGASREQIVVRQFGLAVFDGRTRISNIARFSLRVVGNEIPNGVDFSFTFEKGEMLKEKIMHEKYSWEGIKFEIVFEDSQGNPLDAENMVFRFIYRDEAGQSCVISQSGDERVNCVFRDGKLIGIFEPNTFRRGILTVERRFCREDPDFEKGYCPYGRQEATNIKIIMGTCDCAVVQERVIVPEAVTVKEQIVVPDTVTVKATVSVPAIVQKPRWIPDIEWGDLEECPKDSIWFVVTDELPSAIGRPHVQFSSFYDQYFIDWGDGESYASPTRTNTLDFINHTYAKGTGNIDSKGREFWIMKAKFSNPAQSDIAPNGYVYVKVGVKLAWNISPIKYVVVGEDIDPDYNFEFNQGWDHLEAIRFKGKDRSIRDFPSFSYGRTPLRHILTDGTLKIRKLSGYRFWNIIAENMDNIEVSGGTIGEYIWGNDNMAFGKADLSKMTFGNLSHCFYGIGRSVEEVILPQVEYTGNDMTNCFNNCRNLKRIVFPPKMDYIEKANGAFVGCYSLYDFEFPEGFATKGNGLRIQMSGFNKTFSLDWPDVKLDWFVYNGIVAEGNVGLQNLIFSKESKFSYSTATNLEITNSPLGHDNIVSILDRLPDFTGMSPKTIKLTGCVGVSELTDDEKKIATDKNWILTVMKRLRAKDKYVFVHKDRNNGVTIVSEINYPENYNPCAYWEELPEAEARELERVFNERRTNMQERNVLQEVFTATLTLFTDLLEPVKWFILAAVCLIVADLKFGIEAARKRGEKIRTSRATRRSVNKLVDYICWILVAMSFGKVFGEPFGLPILPALVLLVVYGCEINSCFNNYFEARGSKLRINIFKLFKDKSGDVIEPENRDEMKVILDNGHGRDTAGKRSPDGRLREYAYAREMARKIAQDLKRQGIDVSLLVPEDTDVPLKERVERANRIYAETGKQAILVSIHVNAAGNGSTWFSARGWSVFVDPAASQDSERLATSIAEAAGNIGLTVRRETGGRNYWVSSLYICKHTNCPAVLTENLFQDNREDVDYLLSDAGKQVIVRLHVKGIIDYLNSLMKTLPWLLVGMLLVVAFWGWLRPINTAPEGNREKDTTTFVDTIPYFVPVPRDSIVVKYVIARLPSAVNDSVGSHAVDTVHRSDSVAVAIPITQKVYEDSTYRAYVSGYRPRLDSLFLFPRTQIITVREKPRRWNIGVGAGYGLTPRGFQPFVGVTVSYTLWAFMQSACESGLHFFIDTPRYRAFVHIPLFRNTESAFVFQGSRGHFRLKEGKKFPFMVKVIDKIEAFDYMLQLFEEWRDSHEELKNKPLSKLTALKLLFLTAAPKEGGGKDLLEIFNNFYAMPYGPVESDVYNAIQEGDLPSYTAKYRTIERKKQESETLNYKGPEFDQIREAVGSLREKNELLIGLTAFELVAVTHRWDSWNRAMDFAEFMGQLSAKMPIDSIRKDSNKRFSLTDMELQVCYEKYKVEFGNEKWSHIDYNDGEACQAFYNKIQDFIEFSFIHLTRSILSGEYIREKNFGEILEKFKNELSDIPNPPVVPVSTSQERIQLEFFYLGASLFNAIVSYESFFFIIRNKYKKGNYENSNVWLRRFFRNTDRHSLLETFCNITIFICEYEYYLLVDDERAYKLLEMRDSIEIIANKSSVGVKEICTLLLQKTAFILRRVRIEPLRYITSNLKEETIYPDKLDVGDYSLFEKICEQCSDPDSGSKDDKIAPFVFKMRDYRTSLKNEMDIKSMDDVIADFKRAYGIYKSDPKQQKSEMERVSDEFSWDSVYNYLYNCRFSFLTRVKKDIKLKKIKEELRVIEDIQAATYIQNFHPYEKAIQSIIDCIQRHIDKEDINDHLMEDKFSELERLIPLYKERIEWCKSHVFIAFQLPFEESCVYSEKYELNLFVPSPFANNDDYDALAKRADSYEQQYKSQKMIYAVTKEKVEIDKIKSSIKNTDKKAFDLIAIFTTAITFLFGIVNIFIMNDEVNLPLLICNTMGLGVLLILFMCLYLLASPILIQQLPWKQYVRTRRFYLGIIAIIIYMGLTCFLYNRFEYIGSKVEEKERTENVEKASEKEIQIQEPNNIQDKLKEMSPFLKDFIKANNIHNVVYVEPYAGGAGAALNLLFTRQVDKIIINDASIPIYSFWNSLINHSEQFMNLFEQTKVNLEEWHKEKNIFINRHSQFSVELGFATFFLNRCNRSGILAAGPIGGRTIEKQSNAKYKIDARYIKDRLREKLIKVISHKDLIEVMNNDALFLLQQIDQLPQNEKKHYLIYLDPPYYEHGAELYLNSYTHNDHAELASFLLNRTTIKWVLSYDNVKEIRDLYKGNQLYTFDLSYSVQEKKQGKELLVTSKNTVLPSQLEIRGSKKIRPLTLLMRIDYSKWKTRLLSIEHLKLDIKNPRFSYQSTKEMNQTEIIKYLIENYSVYDLAKDIAINGYLLNEAPIVCKENGSYVVLEGNRRVAACKVLLNPVKYLSPARAKELSKYEPINDKLNCIIVSDRRDADTLIYNKHTGIPLVKWDKVSQDAFLVNLIKGDNLSISEVATKFNVTQSEIRKSLRRYAVHQYSISLFKDEPYELEQIQLDSFPITNFERFYEDEKGANFLGIAFNSNGEIQRRLPQEEFDKRFKFIVNQILNQELTSRSFNNEQDKNEYINSIKKEYDKDKFDLSIEASDSPIEEPPSQEIVSQSNNALTNLETVSNKSKNPRQRSKSGLFTVYNWTKTGNRKLDTLFNSLQSLNYKKHTDVVAVALRCYVDMLVYQFLQKKGCIGLILSDDAAKTQEKNDKKYNELKQYLQSKYAISDEEIDDEELQKLSRFSQKDTMPNRIPELSAMILYIIQHKDLFNNDARLIQVLEKFKKGHGNFVDLKSFNMFVHNNYHSAHDSALEICANELAPVLDFMHSYLANEQMLFDKELDSFFIICFLEKNPPSLQRLPFETGDEVRQLCRWHFLCLSADVIMKKTVALPVLQAKEGRKTSALEKSLIRFFERELEVKLTRREMWRSVSFFARSLAFLEKNPHLCNALHLKQATRFANKAVGIFCVHRSIYSSVPCGALMRPLPVSGVVQRGAELFLSPLRVYILFIHFNALQKMKRTVVLPVSQAKEGRKTSALEKSLIRFFERELEVKLTRREMWRSVSFFARSLAFLEKNPHLCNALHLIRARRLANSYAASIFCACRSIYSSVPCGALMRPLPLLGVTQRGAELFYSLPVFWLTYCFILNALMKKTVVLPVSQAKEGRKTSALEKSLXXXXEAHPPMWRSVRFVASLFVLLLALSTGEPLLALPALALAAYAYRGVADITSRFTEKGGARMKSHTIEFTRDDLVVRITRYPAGEPGKSPSVEIEVESSGLPRSFVWFDREPQLFAFKEMLEEYIETFRSTKDETARMQSPRSLFQKESSSFVIRYCRNRILVGASGNLPEALFVSFSLSPGVAIFVKNMSNYETSASITLEVNGKNAEDRLKALRQRAEDLENALARARNTGDKIEMNKLQKELKKTNKEIREMSSSAQQAENVMRRLDRATPRELSKTLSTLRKQLDNIERGSAAWNAQIEKIKAVQRELNSVKGSMKEHESLWSRFAQKMYDWGSALTMSMAAISGLTITGRRAVQSYADMEGEMANVRKFTGMTTEEVERLNESFKTMDTRSSREQLNKLAQEAGKLGIASQQAVIEYVEAADVINVALDELGEGATRDIGKLSSIYGDAERMGLGKAMLAVGAAINEVSQNSTASASYLVDFENRMAGVGKQADMSIPKIMGYASVLDQNAQQVEMSATALQGIIMKMYQDPGKLARIAGIDVKEFARLVREDANEALLQLLDTLGKAGGMQALAPMFDEMKLDGSRAASVLSVLAGNIESVRREQKLAQEAFDEGTSAITEFNVQNNTVQAQLDKAKKSFNELSVELGKDLLPVMRHAITGASALLLVFKEVISVMKENRVLIVSVAAGIAGYTVAVKASTVAQNLWNATQKAGNSIAATGRGIVLLLRYAYFRLEGQVRKADVVMKAFNRTTKMSPVGILVGALSAGVAALLSYREKMKSAREAAAEAAKAEREYEKSITDVSEAAASASKEELARLQALYRAAVDEARSKEERIEAARRLQSLYPDYFSKMSTEQIMLGDAKAKYDELTDSILKNAKAKAAADLIKRNAEQIVEIEQSMPELEKNAVDTDIAYDRAKKRRQEYIDRYNISPSAMGGGYAQDQSALLSNVMVRKSAPGTDDERKAAEAAWKAYAEANDKLTKLQAANKKLAEEYGISLTDVFAGQGDGGNMSSVSASGSAGKSGERNKFQAEDDWLSIEKSKALAGYATGLMDYNEYIEKKAELDKQYLLKKLQNAEATEKEIADIVGELDKLTEKEVTQRNKEQFDAAREEIEAERRERDAADTDSYMRGRISEKTYQRMKFESEIAYLNRLKELYAEGSQERAEIEKQITDKLQADKLAKFKETQDRQKTLYEEYFKGISLMSAEEREQQYRLQIDSLNALTKKMLDAAGNDEAKRQKIIEASAIAEKALKKQYFEETTEESFNAMEKANAELAEWLQSDGGKAVTDSFGMIMSGMSAIFSQISSIVQSNMEMETAAIEKRYDKEISLAEGNTYKVKKLEQDRENEIARAKNEANRKMFAMQVIQAVAQTAQNALAAYGSAAAIPIVGYIMAPIAAAMAVAAGAVQIAAIKKQQQASEAQGYAAGGFTRPGPVDEPAGIVHAGEWVASQKLVTSPVTRPIIDALEYAQRTNTIGSIRRVSALPAPISLPAPSPDGGGNSPDTGVLLATYFAVLKKLGDRLDEPFVTVNTVTGDRGIKKAQDEYDRLIRNKTPKSRRKMKIFVEGKEAFLKKGTSFEFIAENRLFSGSDEYTLSITFPIVDCPRNRAIFGLLYRKDVDIEKVNFACELRDTNFYKMGVLAIVEVSQSEIKGQFLDGMSAQNFIGDFDEIYINELDLGDYEYVNMSNTPPEWLWRSIDRMKNYISLPWVNNYSGNIQNEVVYENGTYKWHPDTKGVSFQPYLLFIAKQICEVLGYSYDFGEWERSTYRHLIVCNSLPYAWDMPQIAKALPHWTVTEFFEHLENFLSAFIDVDHRGKTVTFHFIANDSDFNTSITLNHVVDDFTVEVSSEGESSYRGVSTLRYSDCDHEMWKFYSCNWLVENHEKMIVRYETLNDLIEANENLKETVVGVEYPDSNLGKILYVESLNTYFVFRPVKIIPQSCYDPVADTYYDQYVNILQPINQFGERIGTNEESDSIEIGIVPAWIDDTETSKGQCLFLELDFNDGETDGNSEYLPISLLESGESEKSGAYFSQLFVAFWDGTNYFKGLQPRPIIDKISTNEDWTYVETGYSMRLNRDPSDLSYFNSPIDSCKKYNFQFLANKIPPVRALFFIQGKPYICEKITATFTEYGMSQLLKGTFYRTDMLKNTIPARIDFNIDNLPQKSTIDEIISFTYPRLRENDPAWYVEFYAFDPVRGKMRRKRIKINRLATKKQRREYAAGLIIRLYQQLIRGWNPWVEKEFKVAISFDDAIKRYVENNKKMYSDGIFRKETYISHESKIKKLVAYNQQRTSPIIYLYQLDKRFCNDFLDYIHLELKLSPQYRNNCLTFLKAFCSFCVEKGLMNENPASGIKPFSRKLFQKRRKVIPPSVIRQISEYLMSNDKHFLLSCYLLYYCYIRPIEQTRLRLRYFNVKNCTLTIPSEDSKNRTTQTITIPKKVMMFMLDLGVFDYPPHYFLFSNNIMPGNVQVDRRLITIRWTRLKKELKLDKDYTFYSLKDTGITEMLDKKLSNISVRDQARHSSLAVTDVYTRHRDNADKAILDLDGTLMATKKFILAEKDIPQAWYNVIADMPNKPMSPLNPATKSPLAVKDLYPIFAEELCKQELNTSDAWIEIPEEVRDMYKIWRPTPLVRALGLEKVLDTPAHIYFKNESVSPVGSHKLNSAIPQAYYCKKQGITNITTETGAGQWGAALSLAAKAFGLELAVYMVKVSFHQKPYRRSIMQTFGAQVIASPSMSTKAGRKILTDHPNYQGSLGTAISEAIELAMSTPNCKYTLGSVLNHVSLHQTVIGLEAEKQMEMAGEYPDIVIACFGGGSNFSGISFPFLRHKLKEGKDIRLIAAEPASCPKLTKGIFQYDFGDEAGYTPLLPMYTLGHNFSPANIHAGGLRYHGAGTIVSQLKKDGLLEAVDIEQLDTFKAATLFAQCEGIIPAPESSHAIAATIQEALRAKEEGKEKCILFNLSGHGLIDMAAYDQYLAGDLLNYNLPEEEIAKNIKELEKIIMIYELPPLPYGINDLAPVISQETIEYHYGKHEQTYIDNLNKLIEGTPFADKPLEEIIKEADGALFNNASQAWNHIFYFFTFSPNGKKSPQGKLAEAINKKWGNFENFQKEFEQAGTTLFGSGWVWLSKDKDGNLVISKENNAGTPLTKGLTPLLTFDVWEHAYYIDYRNRRAEQLHNLWKIVDWSVVESRYLMVGLSVFLLIGIIAILAVFFYFVPFLLWISARVSGVRISLIQLFLMRIRKVPPQVIVRAMIEAHKAGLKTITRDELEAHYLAGGHVERVVHALVSASKANIDLGFQMATAIDLAGRDVFEAVQMSVNPKVIDTPPVTAVAKDGIQLIAKARVTVRANIRQLVGGAGEDTILARVGEGIVSSIGSSESHKQVLENPDSISKLVLKKGLDSGTAFEILSIDIADIDIGKNIGATLQMDQAQADKNIAQAKAEERRAMAIALEQEMKAKAQEARAKVIEAEAEVPRAMAEAFRSGNLGIMDYYKMKNVEADTAMRESIAKPSSKPEKMFDILAVTLLIILALVLAVLEIFFLPGITIAGICSVLFYGGGIYYAYSAFGTNGAVITLFIAAVTTIAVIIGFMRSRSLDKMSLHTEISSVVPSPITPDIKVGDMGVTLSRLNPMGKIIVGIHTIEARADNELIDEDTPVKIIRIEPTVVIVCKETENEKTGNNINTSKQKMFRQILKYSFAVLIAFSTIFSSSALTLDEARELYKAGKYKEAAPVFKAQLKRRPNDGSLNHWYGVCLFHEKKYNEAEKYLKIGAKRKVLESPHYLADMYMAQYRFEDAISSYEEYTAALSKAKKQIPDSIGKAIARARRAKLMLQYVERVQIIDSLIVDADSFFKYFKMSPESGRIGTNKTLGIDIPENTIGYIPQRGDNVFFGYPLEGKGYELCTKNKLIEGKWSDIIPLPNGVNTEQDEAYPFFLNDGVTLYFASNGEGSIGGYDIFITRLNLENNTYLKPENVGMPFNSIYNDYMMAIDEMLNIGWFVSDREQIPGKVTIYLFIPNESKQTYNIDEIKTDIKSLALIRSIRESWPENADYTDLLQQLDNIKEPQKETRPDFIFAICNGIHYTKLDQFVSLEARNLYVKSKELRKNIIQIETKLSELRSQYAKSKGTTLKRLSSEIQNLESQLLTLYPQPENYENQARKIELDNLQKEHRMNRTHIETFSYQLSPQYYFNRLLKIWLHNNWGWLLSFFLLLVGLSIQNPLFIYVGLIILFLVFPMIISYLWFAYALHPDCRMSILSKTVEINKNGLSCTFDDGRTESIAWERITRIRYTSTDIIFHLSNYIFFILPYNSFKSNDDLEYFLKNFLALNIQNKKMQGLYSIGLLIVSNVFMTLAWYGHLKLQEMKVINNWPLYGVILLSWGIALFEYCCQVPANRLGFRENGGPFSLMQLKVIQEVITLIIFTLFSVVVFKGESLHWNHIAAFGCLVLAVYFVFMKMLAYTYVKPGKFELQEKPKPGLKDSRDAIVRVTLGSICTSDLHIKHGSVPRAVPGVTVGHEMVGVVEDVGEDVIGIKPGDRVTVNVETFCGECFFCRRGCVNNCMDPNGGWALGCRIDGGQAEYVRVPYADQGLNRIPDTVSDEQALFVGDILATGFWSVRISEITSEDTILIIGAGPTGICTLLCALLKNPRRIIVCEQSPERIQFLQEHYPDILVTTPEHCEEFVRKNSDHGGADVVLEVAGSENTFRLAWKCARPNAIVTIVALYDKPQILPLPDMYGKNLIFKTGGVDGCNCAEILRLIESGRIDTAPLITHRFSLNEIEKAYRIFENREDGVIKVAIRSVMKNRTKKLFKITGITLGALIVFLSAVIAFSINFIFTPEKLTPIVLNVANQNINAKLDMNSVELTFFSTFPRFGIKLENGTLVSKAIRDSLWQRTDTLASFRKAIAVINLVDYLQQKKISINRLSLDSTNIYAFKGKDGIANWNILIADTTNTPDTTTATSPVINEIDIKHVSLHHTTVTFDDRETNVFANLWDANLKLKANLKKEQSTLTLDFNNKNILFWQNGELLAHRIATHLQTAIELNRSKRALSLHDAMMEINGIKLDIHGSICKDTTAQALDIDLQYGLHAPSLETVLHMIPESILKKEKVSAKGDVTVNGNLKGLYGKGKMPLATLKIEINDASAQYAQLPYGIDELKANFFGQIDLMRQSPSYLDLKIFHFKGAHTDILADAKVNDLLGDPDISFHTQSTIDLTALAQTFPLQDGVSIEGKLDADMNVRCRLSSIKKKDIGRIRAKGKINMSKLALRDKNKKFEFTSDASLSFVGNDVLGAHIEIGNMAFHSTRLNSSINNLSALIKTTNPQDTTRIALVECKLNANKLKASLPDTSNLFCGKTAATIKLQPTENNPTRPEIGFALEADTLFCRLGDTKLGMDKAGITITAQQLKDSLWIPKGIVGFNRLFVRTPQSALPIRMQKTAISVGNRAITLHNATMKIGRSDLTATGAIHDLYGAMRHNKKLRATLTLSSKNLNCNQLIRSISFPKDTAQIETESDTTSTALKLFVIPRNIDFELQTNLNRVRYGKMVFKNVHGAIDIRNQAIHLKELSMEGMDATMRTTLIYQARQPEQGYAGFDFKLHNINIGKLVDFIPSLDTIVPMLRSFQGTVDFNVSAESGLDSCLNIKIPSLRSAIHVEGDSLVLLDGETFAEISKKFFFKNKERNLIDSISVNISVEDGNVTVYPFVIEMDRYRAAVGGNQDLDMNFNYHISILKSPIPFKLGLNISGNLDKMKFGMGKAKYKNAVTPVEIHKVDSTIVNMGEQIVRDFKKVMRRQLPQTQTTNMSTLFFLNMNWHIPAKQYVFCQTTKLPLPYSRIHICQLNASKVGGNIKYIFFTMKPNNPFLISGYYSPELFCDREQETRAILEALHNGRNVTLIAPRRMGKTGLIRHAFYRLKEQQPDIDTFYLDIYSTQSLGDFVRLFASTVLGQLDSASQKALSRISKFVRSCRPVFTFDELTGVPKVTIDVAPAEEENTLKEIFEYLGSSEKRCYVAIDEFQQIVEYPEKGVEALLRSYIQFLPNVNFIFAGSKQHQIQEMFTSSRRPFYQSTQPLTIGPIQRDEYASFATGHFAEHNVKLHQEVFNSIYEKYEGHTWYVQCLLNRLYGYDRNVDMELVSYATEQILSEYSYMYADLLKTYSFGQVRLLKAIAREGCVKEVLAGDFISAHKLRAASSVSASLKKLLDNELIYQTPCGYIIYDRFMSEWLRKQPFMAVKKSELYSTLWKCCDELRGGMDASQYKDYVLVILFVKYISDKKRNDEGFDIDIPKGCYFEDFVALKGNPNIGEEMNKKMAALAEENQLGGVFVADFEDDTKLGKGKDKVETLSKLIAVFQNENLDFSKNRAADDDLIGDAYEYLMKNFATESGKSKGQFYTPAEVSRVMAEVIGLGNAKNGRKTTIYDPTCGSGSLLLRAMCETPGGATLYGQEKDNATVGLAKMNMILHNEIYADIRQGDTINDPQFKESDQLKTFDYIVANPPFSTKSWLKSAKFEDEYHRWGEGIKIGVPPEKNGDYAFLLHIVRSLKQTGCAACILPHGVLFRGNAEAQIRKYLVAEKRYIKGIIGLPANLFYGTGIPACIIIIEKSEAAGRKGVFMIDAKGGYIKDGAKNRLREQDIRRIVDVWQAQRDVPHYARFVPMEEIERNDYNLNIPRYISAPDTEILQDIDAHLHGGLPKHDIDQLDTYWEVCPSLCDDLFCDHLTRKGYYSLKCNPEAVRDAVTGNVDFRNQKEVFQKSFAEWCDSHRAQLYALVPGFAPKKLIEQLGNSLLAVFEVDKSLVEAYDVYDSLMNYWGETMQDDCYMISSGGWTVQLYTPQPASKKKEKKAATPEDVVCDLLPVPIVIDEYFAEKRDVIAAAEELLVQNETQLAELVEEQAENYLDEDNFPDGKVTDANIKKRMKALDKKTDADEIAVLQKYLDLKGDISLNKKLIKECKYDLLTALVVKYADLSEADIKRLVIERKWFASLALRLDGEMQHISQQLTSKVSALAERYAQTLPEIDAEIADLEAKVAAHLKQMGYMDIPQGYKQTELGIIPEDWEIVNLGSVAKINGRIGFRGYTTADLVGVGQGAYTIGGKHITNMVLDLHDAEYISWQKYYESPEIMVRKGDIVFAQRGTLGKSAFIVNDIGPATINPSLVLINKIKCDNEYLSYWLQCDKIVEYICSINSQTSIPMITQNQIEHIPVVLSRIKAEQQAIAEALGDIDGLIATLDKKIAKKRLIKQGAMSQLLTGKKRLPGFSDPWVEKKLGEIGYTYSGLTGKSKDDFGQGNAKYITFLNVLANPILKENLFGSITIRENEQQNKVQFGDLFFNTSSETPEDVGTCAVLLSYHEELYLNSFCFGYRLTDDNVLGLYLAYYFRSRLGRQLMTSLAQGATRYNLSKELFNASRIILPETKDEQIAIATMLNDMDKEIDDLEAQRDKYRLLKSGMMQKLLTGQIRLTKPLTNVVPLVPGDSAVREIPVDAHIWAGHIVNRLWQSKGWGRTKLQKSLHLVGCYAQLDLGEEYIRNTAGPDDQRLMNYIDRKFKQYRHVNIEKERLLDGKIHYTYTPTSRIQEVEMAYERYPQDIRERVDNLLDKLNLMNLAEAEILSTLYAVWNNRIIKGERITDDLLVSDFYAWSEHKADFEERKVRRMLDYMCKENIVPIGWGKYIDEKMDTNIGAKERVTQNRLIGLFKNVLKYTCLGNWETREGNVNIEEKLLTAYLSRCGYTDKEIRGAIAKLKQAANSLGGGLYNANKEVYTLLRYGVNVQAEVTEKKKMVHLIDWANPMENDLQIAEEVTIQGESDRRPDLVVYVNGIALAVIELKRSTVSAHEGIRQNIRNQQDGYIPRFFTTIQLLFAGNDTEGLHYGVIKTPEKFWLRWKEPCGEPCQPSHFTVGEYPNELDRSVLQFFEPARLLEYIHDFIIFDGGVKKAARPNQYFAVKAAQPRVRKKQNGIIWHSQGSGKSLTMIWLARWIRENVSDARVVIITDRDELDKQIESGFKDAGEQIQRAKSGGKLIEMLNAAEPWLICTLIHKFGNKNDGDAISVGNKKASKSLDLYLEELAKSLPADFRAKGNIYVFIDECHRTQGGMLHEAMKHIMGDDVMLIGFTGTPLLHTDKKKSIETFGSYIHSYKFNEAVEDGVILDLRYEARNVEQYLGKREKIDEWFDAKTRGLSSVARAALKERWAKMEKLFSSKERIDRIVADICQDMSTKRALAGGYGNAMLVADSIYQACRYWEVFQSTELKGHCAVVTSYDASTASVKDEYQGDGETEDLTKYEIYQRMIGDKTPEQFETWAKKEFTDHPGDMKLLIVVDKLLTGFDAPSATYLYIDKKMRDHNLFQAVCRVNRVDSEEKDFGYIIDYQDLFGAVKSAIEDYTNGAFDGYDADDVKGLLLTRLAEGRKALEESLQAVYTMCEVIHPQTREGYFAYFVYAENTPVEDQQNECEGNANKRETFYKLVSRLVRRYIDIANEMEQAGYTAEEAADIKKQVDYFNDIKDEIKLKSGDALDLKYYDPAMRQLIDNYVRAEDSEKLVDLADISFLDLIDTEGDKAIDALPKKIKQNERSVAEILAANMRKMIISERPNNPAYFDKMSDLLNHLLQEQKDGKIQYKELIKQLIEKLKEARLTIKTKYPATIDTKGKQALYDNLGGNEALALRIHEIIKANARDGFRDMDSSGLKKMRALRRAVESALKGVEQDKLDDIMQLIVAQKEYMTIIKVSNIFAEVEWKEIKNIHLTIYPPNARVHVSAPIGMTEEAVRLFLITKMPWINQRITQILGQNRQTPREYVSGENHYFKGQRYRLKVLYHNAPAKVEIQGNEYIKLYVRDGASAERRAEVLREWYRSEFKSILAPLIAKWEYLLGVKANKWEVKQMKTLWGSCNHSTKNIIFNLELIKKPVRCIEYIVVHELLHIKVRLHNEEYTALLTQYFPNWKQLKEELNEFVVMGKTITTYLIDGDPKGTQYAFISNKICQMFVIPRSNLAYLNEQEKLHKPAFYILIGEDEVTKPQAYIGETENFKERVKDHDSKKAFWQKALVFVSKDEDMTKADVQYLEYRAIVVAKQSNSFVLNENKQIPKAPNLPEHQRDAMDEFFEDIRFLASFIGCDIFEISQPKEEHLFYTKARGCNAKGFYNSAGFTVLKGSIIANNCVPSFTWKAKREKMVEEYATLNNGVWIMDSDKTFSSPSTAADFCIGRPANGWNEWKDKDGNTLDFIYRKQLEMARYTSGKQGVIPRYDIASILVFNERIYEYGDKVKVIILWKSVDCKPEFLWKSVMRDCRVSILRVLEHSILLETFSDERLIDHRGYDDAGIPLKRMRMNGKIMNYKFDGSRVFFTSDTHFNHTNIIRFCNRPFKDVSHMNETIIANWNRVVGPEDIVFHLGDFCLGGSVEWVNVLNRLNGKIYLISGNHDIKNLRQNYTKYFEHIAMQMYIEVDKQKIYLNHCPFLCYGDSYDDTWQLFGHVHTRRNNTGKDASRLSMLLPTQYDVGVDNNGFTPVSFAQVKAIIGKQIEQSRKGEQMKIQYMSDLHMEFQENSRYLKNNELPVTGDVLVLAGDIFYLRDKVAPLTKFWKWASENYRQVLIVPGNHEYYNYSDVMERGLQWRWMFRKNVGYYQNQVVRIDDTDFVLSTLWSRINPNDEYFVWKGMNDFRQIKFDGKLLQVDEFNRMHENCIGFIQKSVEESTAAHIVVVTHHLPTLQAVAPHHKSSVLNSAFASEYGELIANSRIDAWIYGHSHTNIDVKIGDTPIICNQMGYVFEDEHLMNGFDPARFIEIMNERKIIDRKLLSDLATEVRLNASHLEALGESRQWEIVVGVDMLERMVEIQHQFERLAVMGDDEYRGFYIEVPRPTPEEWGDAEELIASGEYDSRETFLADWLAFNPMEARWFHVASNRYGDSRSIRITDRKHTHFIITNRSKCTDAEPDDTWCRENLTRLFDYLERMIDVIVANPDGFNDYVAHNLPYQQRIGRIAQREFNRIMPNFKIEVEDRETAIKALEDSVHGLSAPLLETMTIRKYCAYFRIANEVYENYHRKRGFRGRIHTDPQDVPEELRDMVYYKRKKFVDVMEMYDIDSPEDFIRFATDHYGELGLSRLNIFASNYRQQGWKIVVSNSYSANAGLAIEVATALYKAGAPLLIYDAKKLLRILLEEDSVRLVPYSYHNYMGYQEEGAVYELPWEYECSDDTNSVLTKEQYKEIVSNAEWQDIEQVKWMNQEVKDFQRATADRILHIYKNLGHRRVLLADEVGLGKTFVAKQVINLVREWHKQKKDDFFKVVYICSNANIADQNIEKLGVENRMSISESRLSMQHLYIKLAEKLIAEQHEKEEMPESIIPLTPSTSFRFYSAQGTANERALMYDILCGLTQFKEYKEVISDFLSCNVKNWQELIHIYSNRIELCGDDYLREMHGKLQMSLSDTIINQLIGYAKYGYDNRQQADMINKLRRIFAEISIDMLDPDLVIMDEFQRFNSLLEQGDDEQSMLTNKFFDDERSNTKILLLSATPYKPYSTLEELNTNGNDEHYQDFMKVMDFLYATKDKADRFKLIWHTYSAALKRTDVVDLTPLVVTKNEAEEALYGVMCRTERFNSGIIDDSRVCDVQVVPEDILSFAEGQYLMDCLNHENTKMRLGNLPMEYVKSSPYLLSFMDKYELKKRIVSALSHSDVKKYGKIDALLLSRYAINNYRPIPAANGKLKYLHDLVFGVRHEKKTQLLLWVPASNPYYKAGGAFESSEARNFSKIILFSSWEMVPRMISIMMSYYSELYTFGELKKTIPEIRYTSQKKNRYGENRLRADGLLEYPCQTLASLFSPATFYGEKLSSIRKIIKQKIQEEFARNSLIRTIPQQGRNNARLVLTLMKILDGKPVEDLTGLYVPSNALDVMTDIAIASPAVCAYRQSGNEEDAQMVAKAVVSVFNKPESAAVIDLIYNKKNDDDYYESVLDYCAMGNLQAVLDEYAHMTQTKMLGHTVTEAIIGTSNLSIDTTDSLGMEEKKQLMRCHFAIPFIDKTITDKSVAHTTNIRKAFNSPFRPFLLSTTSIGQEGLDFHWYARKIVHWNLPSNPVDLEQREGRINRFKCLAIRRNVVKLYGSETYHPWDELFSMAHSNLKGTHSDIVPYWCLPVSELTEEQRKKLEYIERIVPLYPLSRDRYKYERLIKVLALYRMTLGQPRQEELLNLLKNMHLSDEQLKKLTIDLCPYNKKVIDYGMADALWNDIVYTDVLQSDGFVIDYAVCTTYSLDMPSLLSVPFMLGTMTDLTETAMHSPHLILETINQSAGKFAVFCNAGCMVVPQANSKVYSLLEQSIVQVTLQAKGGGFVNFHPKVWIIKETNPDTDAQQIKLIVLSRNLTGSNDLDVVCELIGKIGTKPATRKAQVKHTPLVDFLTWLIAKAGNRTIRKNMHSICKDIDYIERFDLTDSPFEDYEFFPMGIPGYDGYTKCFEQSMLNHAAEMLVISPFLDKNILKQMVSCSPGAKKTLITRHDSVTKEAIKLFNDGVYTPKEVLTDKVEKDVVVDLHEKVYFIRRYDGNSSYNHLYLGSTNATMNGFGRNVEFLLHLKFVPYKFSYEKCRSELINDSKECMFEQVISVPEEDGGKEDVTNELMLRQAISAILQAQVRFNDGSYTITIQCQTNRMPSEPVFLYPLGCDGKEQVLADGLIFKDMPLDSLTEFYTIRIRDLRRLIKIHTEGMPTDERDKAIFRSFINTKGKFINYLAFMLTDEVEQYILESQQLEKELANDKTSSLEQQISTSLYEDMVKMAYKDPDRIASIRQIVEKADETVIPDHFMEMYKTFENVLKQIKRLMKLGYIHSNREEQTRVMQVLKMTSESVALDELGIGRIRDAFADRMFPGISTLQKHMKYFSLMPQLYRKATEKRYNRLSEVKAEIIRLERIMTKNLCEGNNTPGITGREMIGKNTNSYVKYDPAYIYNSGLQTFGILRSPQLYELIYSTSKALHNGPKVTKTDDEDTNDDADEKSGLFQFCSFPNVYYDFTQKCTLDLTVEDKDFIVDHILNAEACQGSLLRYIVDNPDFAIADSFEQNPFRHLPQEIGELQDLARRFADFIYMVHIRYNYIYSQYQDEEMRIEFQEKLEEYRNSSTDIDKVLNAVSIRENSGKWFCKEVAERIAANDIEEDGGLDRLIINRERRVKGNRRKIGNPAYIYDKKNRIHYYKLTYRWETVKTFAKELRKEAINGMIIDLEKRGDKQIFVTERVSSIYQNKNGLWTVRFSSSPRLFNYNPSRLLYLTHPDTINLGEKGLYINNKHINNVAELLRFTDGHYIFYRVTYNNGYYENLEGNEVYITRTPIDKNEGSIWDYLRKLADETGLITEEDDESILSKQYELVDVKRDNVPLAQYLGDKTKLATYSMPKHVYYPFGCNASQKAAVEAALTHQVSVIQGPPGTGKTQTILNIIANLLMKGKTVLVVSNNNSAVENVAEKLNGEGLGFLVAKLGSVQNKETFIANQPEHPAMTGWKIDEQTTTKNLAKDSLQAVSQGFDAQLKQAKLKAEYDALLKESKYNEMREDNQTEDEWLNGKPSAKLMKLLNRYQTMVENGHKPGLWFRLQWAFSLGTKILTFLNRKATDVINSLESAYYFSRKTELEQELESIASALQSIDIQKSMKELRSSSLQLLKDKIAKRYNTGQRKKFTIKDIKPRTEEFLKEYPVVLSTTYSAKSCISKDMVFDYVIMDEALQVDIKTGALALSCAMNAVIVGDDKQLPNVVGREEELALKAIQTTYQVDDRYNAITHSFLQSCVEILRDAPVTLLREHYRCHPKIIEFCNQHFYNEELIAMTTDEGEKDVLQVIRTVPGNHARGHFNQREIDVITQEVLPECAKSESIGIITPYRAQAEAINKTVGKDIASTVHKYQGRECDTIIMSMVDNYPTEFSDDANLLNVAISRAKTKLCLVTNGNEMPEDSNLSLLISYIQYNNFEVKSSKLHSVFDLLYQQYTAERLAYEAAHPAVSEHLSENLIYDILLKAIAELGLLHTGVFCHYPLSRLIADWNQLEDKEKAFVESPFSHVDFLLYNSLTKQPISAIEVDGWHFHKENDAQQSRDALKNQIFTKLGLHLLRISTADTVNQETIKKSLLAILMQFHTICHELGHLFCYHQFYTESKRRKLTIKEREFEAETVAWLVCKRHGIYNPSEEYLASYAPQGEIPICSTDLIMKAVAEIERMMESPIKIKESLWYKEDKGLKEKIRVIERQQKGPDLFAMYHIVNKNTPVCILYDMLWLNTFSYSKISNNRIFACQKKKIQLYSQLDFNGRYYTHGQMKIQYMSDLHLEFSDNSRWMKHNELPVTGDVLVLAGDIFYLKNKVAPLSYFWKWASVNYRQVLIVPGNHEYYNYCDVMDKGLQWNWMFKKNVGYYQNQVVKIDDTDFIMSTLWSQISPSDEYFIWKGMNDFRQIMYNGKLLQTEEFNQMHEFCLDFIKHSLTESTAKHIVVVTHHLPTLEVVAPHHKGSVLNSAFATELSGLIADSRIDAWIYGHSHTNIDAEIVGTKVVCNQMGYVFENEHIANGFDSGKYLVLMSEYTTVYLRHKDMPLLKKKEHPSHEECQSQSKEDLMKVIREIDEYNKQVAESLGCKLFYLTTTPSRELTVLPCSPSPSVLTNVLLEEVLCFYKEEIEHCKKAIAKNKEDIAKLEVRIAKTTVDLYDKINKEIDNCYENIDFEEEELEYYQFLYNKFSFLEGIIFNESNSKNYELIYTKYMNYKFDGSKVFFTSDTHFYHGNIIRFCNRPFKDVEMMNETIISNWNNTVGQYDIVFHLGDFCLGGSAEWTKMLDRLNGKIYLIMGNHDLKNIRQGYIDRFEHVAMQMHIEVGKQRIYLNHYPFLCFDGGYKDVWQLFGHVHTRKNNTGIDAARLQYLYPMQYDVGVDNNNFTPISFEQVKRMIEKQVEQFHKKMFVGKCLLYEVQCVKQEHSTQIQCVCCSELWLLLVICSFCFFALLMFYCLKSNAKLVNKSHSRITFHMHLTQSIIEYKMANLNCIKAVLAEKGIMSKWLAKTLQKDPATVSKWCNNHSQPDLYTLARIAEVLDVDIHRLICHTKEEMKYTIEEIRHMQEGQTFDCKSILIEPKHLATIIVAMANADGGMIAVGISDKTRRIEGVNQDKEHLNDILRTPLDFCVPSVSVTTDYVPCTDAEGRDNRVLLMHIPASPRLHANQADEVFWRVGDKSRKLTFDERLQLMYDKGERYYEDSTAYDATLDDIDMDAVKAYMKRIGYGKSAMEYLQENKGFVTYKGDVPQVSAACILLFGKHPQAFFPRARVRFIKYFGTEEKVGREMNVIKDVTFDGRILEQIQKTVEYLETQVKEHSYLGEDGIFKTDREYPKFVIQEMVVNSVCHRDYSIKGTEIQIKMFNDRLVFETPGKLPGIVRTDNIRHTHFSRNPKIAEYLKAYDYVKEFGEGVDRMCRELSALGVKEPQYNLVAFIMKATVCANILEEVQEANHSDQKRPEADQLGHNKGITGAQQGHNKILSLIAENPQISISALAKQCEVSEKAMRITLERLKAENIIKRVGPSYGGHWEILLSTSKEIKMAKKATNKKENLPMEEVLWKACDALRGSIEPSEYKHVVLSLIFLKYAGFHFDKRRREIINDGLEDFVDSVEFYAAKNVFYLPETARWTYIKENAKQPNVASIVDKALSDIEKENKPLRGALPNNYYSSLGIEAEKLGSLLDKVDGFDTILESADGNDIIGRVYEYSNYKRLGNYIRQVDVRNRDLVVNKLLGLSIAKQFITSIANTTGTDMSTYKIVQPRQFGYVPVTSRNGDKITIALYEGESPCIISQAYIVFEVIDETELLPEYLMMWFRRPEFDRYARFKSHGSAREVFEWSEMCDVMLPVPPIEEQRKIVSEYQAIEQRIENNRRLITTLEETAKAIYRKMFVDDIDPENLSEGWRMGKLGEVITISSGQSLSDKVDIQTDDYKYPVAGASGIIGYSRWHNQNEPFITTGRVGTIGVVNRYLSSAWAADNVLVAKSPYYEYAYQVLKNVNYQKLIGGGVQNLITQTSLTNIEMMIPPLEKIELYVKSINGIAGLSICLDKENWIMECLQTNFLSKLSNYMQFLFDLDSKGYLKRRESAILEYKQNFQKGDNLLKYLKTLVGMANNKGGMIMFGIQDSPHIPLGMSNTRFQEIDPKEIDGRLREYFAPSIKWRSDILEKELDDGSKKTFGFLIVEEAEEKPIVCKKSKDNILREGAIYYRYRGETKEIEYPELNSLLQCEREKERILWIKHIQKIALVGPRQINILDRYNGEISYGDKKVLIDKNLVDKLNFIQEGHFTEKEGEGLPTLKLVGTIDGLIDVDDAVIDTNAVYPLTTKELQIELNINSYQMQAIIYALDIKNKPKRHTEIYHGEKSNPIHKYSQSVITVVKSLFEKHGKDIFINDCVAKYKANLATKPKKKRRKRMSSFHESQLEQAFVELFQKEGYDYVYGECILRDTRDVILYDDLRFYLRKKYKTDHITEDEINRVIARLETSDGGGVYAENVEALRLLQEGFSLKRTNPKLPNLHIYPIDYTEVDNNELGKNNIFKFVNQLVIDGEHHRIPDGIVFVNGLPLVVLEFKNAIKQNTTIENAFKQLTVRYRRDIPKLFRYNAFVVISDGVNNKVGSLFAPYEFFYGWHKVEATDSILDGAFDTMFTMMRGLFRKERLLDVLHNFIYLPDTPKDEDKIVCRYPQYFATTQLFNNILKHSRLNPDGDGKGGTYFGATGCGKSYTMLFLARQLMRSKKLSSPTIVLITDRTDLDDQLSKSFLNATKFIGDKTIVQVESREKLKEHLEKRTAGGVYLTTIQKFEESTGLLSNRANIICISDEAHRSQAGLGQKTTITEKGVKHHYGFAKYLRDSLPNATYVGFTGTPLDNTLDVFGPIVDRYTMTEAVADEITRKIVYEGRAAKIMIDSVKVKEIELFYDQCKQEGSSDYQIEESKKMMTRIDVILNDPDLLAKIAQDIVEHYEKRIEEGSTVLGKAMIVCSSRSIAWNLYQAIIHLRPEWAEIKECIEGETLSEKERKEIKPMPRIAMVITRDKDNDSDELYNLLGNDEYRKMLDKQFKEEKSNFKIAIVVDMWITGFDVPSLDTMYCFKPLQMHTLIQTISRVNRVYPGKEKGLVVDYLGIKQQMNEALHQYGGNGDVDGPDLETVEEAVKVVKDELDVIKRMFHAFDWSGYFIGTPLEQLGILQTGAEYIQHTKELETRFMRHCKKMKGAYDICCNSEHLTEAEDNDIHFMLAIRSIISKLTRDNAPDAVKMNKRVSEMLKDALMSEAVEEVTKIGVAADEEIDLLSSEYMQRLDQIPYKNTKVKLMEQLLKQVIESLRKINRQKGIDFTKRLEDIVKKYNDRSDDAALANDVIDDVVGEMVRLMEDVANERTAGNSIGLSFEEKAFFDILKSVAVKYDFIENFSNEKLTELAKQIKTMVEEQLDVSDWLNRPDLRATLKMNVIVLLARAGYPPKIRDEVFKEILEQAESFKRHSRPRPYAIDYDSYSSMVAEPMNRIVLIGNGFDLAHGLPTKYENFINWYWEKRVNSFAGNLTSISEDCLCSIKITSDNYNRCWNVFAFCLPKFINKPSGKEIIDSIANDSESFEFSLPPFFKNICTCIETKGWVDIEKEYYDLLRNLIVSPDNCDYAISEINKQLHYIQELLAEYLSSITTDNIKCNAEILRQIYGNIRKDDISISQLQVYYDYADYLIQQDNVYQQLLCRYGFEGSDRHFMAEDIKQLRKQFVNSSEIEDIYLKDLIIPENIMLLNFNYTEVADKYGYLKVASTNHIHGDLNNPDSIIFGYGDELDEDYKDFLKQSDNECLRNIKSIKYLESGKYRNLLQFIESAPYQVYIMGHSCGNSDRTLLNTLFEHKNCVSIKPYYYQKDDGSDNYLEIAQNICRNFTDMKLMRDRVVNKMFCEPLSQFKMAKNIEIRNSTAEFLIFMLEGKEDGIQVMYKNETIWATQKAMAQLFDVGVPAISKHLKNIFESGELVENSVISKMETTASDGKNYNTTYYNLDAIISVGYRVNSVRATQFRQWCTFVLRQFAIRGYVIDHKRMENGAFLGVDYFEHLLAEIREIRLSERRFYQKLTDIYATAIDYNKDAPTTHLFFKKVQNKMHYAVHGHTAAELIVERADANKEHMGLTTWENAPNGKIVKTDVSVAKNYLREKELEEMGRIVNASLDMAESMAMRHIPMTMEDWAKRIDKFINLFESPILQDSGKVSAEYAKEFAESEFEKYRIIQDRLFQSDFDRFEDNSLPALDIEMETAAPIENLAQVATRWQDTMLSLEKEYEQEPEVLKIGGVPIGTLGNFSASIGKAKSKKTFNVSAMVAAALSGKEVLNYTTDFPEGKSRILYIDTEQSQNHCMIVMHRIMKLAELPANEDCDRFYFLALRKFNPKERLAIIDDAISQIEGLGFVVIDGIRDLVYDINSPSEATCVISKLMQWTDEYQIHLHTILHQNKSDENARGHIGTEINNKAETVIQIEKDKDDNNISKVESVHTRSKDFLPFAFCINDQSLPELLPDYVPTKKSVGRPKQEPFSPYRDIHETIHRKALELAFEGRETISGYKALEEELTTAYELAGTKFNHNKIVKIIKFLTNKRMVIQESRGIYRFMPDYHYMQRNKLTFNDLPEVVGELCERISSMENLLTEKLHQQHNEVKKDTHVPMTVDEVCEYLGISKSSFYYKAKHGGIPIIKQGKHLFVYRDELDKWLESGRKGETPISIEEEHARMLATTRRKANPKSWMHENIEYFAHGQSDLYKPIHSKVDNSLRSIDLMHFVWNIGERLSISLIDRATFIHTIFPHELKDASIKYLAKNLRTRGVCKIALDIPKTGNYHFKCMKNAPESDLDSTNMKIISIKEYNALMNFMESKLKSLWNHENEEREKQGKELINVFQFGFSILDINHYYIDENYDFYIVFNSSFLKMISSSILDATKKYPNKFGTGDAEDVIDALYNTSGYKYWGTKQDYINFLTGHACCYVVYQDNGIFSDILRIDMFRSTMPNKEDPTKIDFVGGLLHTLKHFSIKDQNLSTGTYIYNIFDIRHIIYLIGMAFRLKKGEGTKYKSLQQLTNAIMLASFYKEEVTGIFFLNSYYKKKSISMCKIQNISDNPFARFSAEEEEDLRSIFVKPRYYDALKSNARQGNSRILVGQRGLGKSATIHMLFEDLKANGTLPLLITRYEGIPLSNNKGYFLYKIVQSLTKRLSEHLYKNRKDAKLLSKEQKKRLSYLVEMFYDDEIAEDYLKQAKVIKTKKRNIGLSKFFNKNLKLINGVVSGAIKVTSSVVRQSMGLPENDDVITTIPIFEEIPINEINSLSMKDVVDKGNDKILALLKHLVDIALSLNYGSIVVLFDKIDEFSEINADVNKVSEFTLQILTDTNLLYTNKLSIVFSLWSEVKRTLNNRGVRFDKFQDIDISWRDEELEQIINKRLLHYSINKKQPVSLQSLIPFENDRKTILSLAGGSPRSLISLMNRLYDEEMGDNATNGDVVSFSSATISKGLIEFCKRFDYESLQPSKISDKNNYYNWLNKVLLIKKPYFTISELCNVFNIKTATARTYISQLVKLGIILPDASENEDTIYRTTDPRICYLMSRGISSLSMASLPYEAYLYELFFQYILLLDFNRFISKEMATKLPRKLEQKMQTVGEQIRLARLRRNLSIAQVAERATCSPLTISRIEKGVPTVAIGIYLRVLYALQLDDDILLLAKEDAIGKALQDLSLKKRERASKKEMGTYINKSQGADFDKWKIAFGVRLLINDLSNKIIRNYGKYKENSKYFRKSSKINNDYNNRIIYLYVVFMLYFDESGYTGPDLTNVSQPYFALASVKMTNDEIACLKKDIGYYEWGKELHFKSMYTNPQGRAILDKIFNHPLMDANHVLPSFADKRYCIYANIVNILVETMYYNKGINLYEGAKNLILANGLYYFAIRHPNKDLVAEFEKNFVTMVRTPSVASVADFYRTTDKLRGDTGTESGFFEMLSEIPLTIQYIKEALPYMKFYIDLTIPLFSVSVQEWYKRTGEKEDVLFDSSEPFFANKEFMEYLRDMDVPETVVGYGKGKHVYPLPIGNIEIVKSHEEFGIQLADIFASALVFALTPRTDKFVKYQNKIRQLPIFQNIKLNIAPSSIDFIEERMQDTADIDPLDFLCMYGNSKNTKQDMPENLYLEFDAFLRSIKQNLDGSFGVLLGAGASISSGIQSANDCIWDWKFLIYQSLSGNQKKLVDPKKSDLSKDIIQKWLDVQGKYPQLGSPEEYSFYAEASYPIDADRTKYFESLCNGKSPYVGYKLLCLLNKYGIVKSVWSTNFDGLVERAAQQANITPIAINLDCVDRIYRTESSNELLYIALHGDCKFRTLKNTEKELDSQNSEFVSALRRYFVDKNLIIIGYSGRDKSLMFALKEAFTDKGAGRLYWCGYGKDITPEIADLIQTIRSAGRQAFYIDTNGFDNVMLSLVKFCFNEDSNKQEEINEILKVISIDNTTTPFSIHDGSTKKYLKSNLIPATFPDEIFQFQISYDKNENRWKYLREKIKEKPLIAVPYKDKVYAISTVSTINEVFGKNLISEIERVHISIDEIEKNSYFKELFLKAVLYGISQITGLGVDYKRYRLYKKEIYANKNNVTIHEAIECGLSFVPQEKYVLFSITPTVYFISNDQIKKEIKQQYSHEYLDKMRNQQYEKKLQEWCNIMFNGKRLSFEIPVNSRSGFIFKISNNRGYAEIHHCGQGNTTIYSPKEYNIKQTLYHGIHINEPKLEFINPYINKPAYDDNPMRGLSKYRPFDAKYFDVFPKDVCIGSICPASYSSKFSEFIKRLNSTISADKLSDYVHHYTGFSNIYNCRLEIPETHSEKWVSINDNPKSAINLAKTICTEGQKLSEQFPGIVLLIFIPNSWSNYRQFNYHGETFDLHNYIKAFAAQHRFTTQFIEEKTLYDKMVCEISWWLSLALFVKALRTPWTLADLDQNTAYAGIGYSIKKQYSGKAEVVLGCSHIYNAQGQGLRYKLSKVEHPQFDKKKNPYLNFEEAYKFGMDILALFQDAMEKLPQRVVIHKRTPFKNDEIEGITNALKQAGISEIDLITITQEYDLKFIAEKIMYGQFLEDGYPVDRGTCIKLSSRNALLWTHGVVPSIQSNRRYYQGGRCIPAPLKITKYYGHGDLETIAKEILGFTKMNWNSFNLYTKLPATIDTSNTLAQVGNLLRQYNGVTYDYRFFIMPTNKNAQLRYQIIDKCLSNWSRRYYIEDLVDACNEALYLYNGETKDGCGVKKRQVQEDLKFIESEEGYGMDIDAIRDGHRKYYRYHTKGASIKNQPINQEELNLIYDALILLKRFDGVPQFEWLNDLEKRLYTTSKLGDNLDSVVSFQHNPYLKGMDLYYKPIFNAIVNKRVIEIIYHPFGKDARIVIVTPYHLKQYNNRWFLIGKHKDSDYLSNFAIDRIEGVKETSKPYIIQPEGIDFKEYFSDIVGVSRSNAPVEEVILKVSDKAIGYIVTKPLHESQSAVTTPLEDGYWKITLKVQNNYELRSLLRSFGAQIEVIAPESLRQMMKETAEAVSQIYEKMKHISIRVPWHDNKWNGTICQCPKNNPFCMMLHNISERKDENKEETYAGKDWNSLKQDQLPACVGENGGFMNEKPYKRIFKHVYAFGETPHAKLLPTTIELKPYSFFGIPFRYLSRDYQEELNHKYPNLSDDETAPFPTSWVYGKERQFEILNHFRLNIEAGTSLGVFYCKSGNPIDEDAKLIVGIGEITKVLPVQTYDTTTDYTYPFWDLIFEHGIRTDLKKSKGFLLPYHEYMSLDEDYVKAQTGKSKQEVIDEIKITIPKLGNSQIIFNELSYGCDYVSNHSMLIILNVARKCLESVIKHGLVGGNWKQQILWIDSQIAKVKDMIGPFPAFAEALSAIGVNYAFIIEQDLRNNGYCGVKDNPWEAFDKLMKGELSLPDSVYKSELTHYRILWKNTLSNQRQVLELLSRFEINSEVIKWWFDCPDCYDELLNNPYIISEESLIENYLPVTTEMIDLGVMADPKIQGKWTPKAPSLVESVIDNRRIRSFIISKLVASLCDGDTLISANEIELYIKDCLAADNHQLPYNYLMSNKEFIEEKTVYLNTDDRCALQLKEYKEIDDYLRKIFKGRASKDVKSPVKEDWNTIVKASIDDYNEANERCRNAVADQVKALEMFCSKRLSVLAGPAGTGKTTVVRAFLKSPQIKAEGTLLLAPTGKARVRLGNMSAGIQALTIAQFLTRQGFFDWATMTPYVPEDAEKRKYCGAKNVIIDECSMLTCKDFYVLMKALDLKNINRIILIGDPFQLPPIGPGRPFADLFNYLKDNKDEYLRSAITKLRYVVRTINTEDSDILTLASWFSGEKPAKNSDLIFEQVAKGNLNNDLAVYTWNDENDLKDCLKEAIEKELPEEEGKSLSDKIRKSIGLDDVNKALNDPSKVERFQVLSPVRNPVWGTFQINSYFQEWVGINKNFSIEIAPITISALDKVIQLKNERKKSTSKEECQLSNGQIGFVNYANKREKKSTVVFTGLPNKRFSYYSSKSDEADNTIDLAYAITIHKSQGSDFDTVLVVLPKSGRILSRELIYTALTRARKKLILLIQDNISWLIEYTKPQMSVLAKRNTNLFSTSVREDISNIPYVEGLIHTTLKPGLIVRSKSEVIIANMLYERGIDFEYERMIEDNGRRCIPDFTFEDASGDTILWEHLGMLDNPAYKESWEKKRDFYKSIGYIEGVNLFTTVDHENGSIDSTEIAAIVDKLEDLIMDNINDIQYFVKESQFEQALVDLLPHHGWEKEVLVQPTEEDLIQNWAKILFDNNRDINKLGNCPLTASEMRQIIDQVNLCDSPYAMNMFINGGQVCIKRDNPADTNNYGKEVYLKIFDAREISAGQSRYQIARQPRFKASHPLGGDRRGDVMLLINGMPVIHIELKRSKVDVSQATFQIKRYTHEGVFSNGIFKMVQIFVAMTPEETLYFANPGKEENFKPEFYFHWEDFNNTVIRDWRRIVSDLLSIPMAHQLIGYYTIADDKDKTLKVLRSYQYFAASKISDITHKTNWDTHQHRGGYVWHTTGSGKTMTSFKSAQLIANSGDADKVVFLLDRIELSVQSLDEYRGFAGEDEAIQDTQNTAILLSKLKSTDNDDRLIVTSIQKMSNIKAGKDISQDDIDLIDRKRLVFIIDECHRSVFGDMLIGIKNTFKRALLFGFTGTPVFKENAKHEIMTETIFGDMIHKYTIANGIPDHNVLGFDPYMVRTYDDNELREKVAFSQLKVNSIEEIENDEQKMVVYNRFMNELKMPDTYKEGDETLHGIEHYLPKDLYQQPVHHQAVAADIASGRDKLSKNGKFHAILATKNIPEAIAYYRIFKEQYSSLNVVAVFDNNIDNSDGGIAKEDALLEMLDDYNRKYGTTFQLSTYAKYKKDVAKRLAHKKPYLNIEHDHAQQIDLLIVVSQMLTGYDSKWVNTLYVDKVMKYVDIIQSFSRTNRLFGPDKPFGIIRYYSFPYTMEQNINDALDVYVDRPLGVFVDKLESNLTNINQKFLHIRDIFQAQKIENFTKLPEAREDRNMFAKDFSQMTHLLEAAKLQGFTWDKDEYEFQHGDTYTYVKMELDEQTYLILLQRYRELFEGNGGGSTERDDFDYPIDTYITETGTGTIDAEYINSKFVKFIKNLYMSGPGSELTKEAFKELHKTFASLSQKDQRTAMIILHDLQSGDLHLSPGKTIYDYIAEYQFRELHKQVMILAEATGINASQLEHIMSRNVTEQNLNEFSQFDNLKLTLNMAKTREFITKVEGTEVPARLVIPKADKLLREFILDSSCRERILKAYLNMEENYQSEEEQVPQDEDVITDEVQHVDVAVIKDNIRSILKTTLTAVLPQMRPIDEIINSVFYVIDTPSIDSLDNVGMFIQRAFTNLYGKRATIVDKFVAFNLLVTKFEAYLKKLYYLMKGHEVPAQNPGEDVTWKNVIYAHKCLWNLKYSTDEGKQQLYQYLMLIKGWRNSESHISPTASEKEVDTAISIILTMYFYSTGSSITDLEMNRHEIQKSESVHKENSYVHKVIQLHPYYNEENDDQQLVAEADVKNWPEEKRIATLKKSICQFIGYDPKKSPLSKQRHWIAIYRIAADKGFIIEGDFAYFKRIIDDMQINNLPVPLKIESLQSSIKDVYAKDIEDWTDDNLSGKKLAEYEDIKKCADAFAKIVGNNINTKMNVPEIRFKEFCDYYSDVLLEKCLSVSNKKNNKLEYKKEDALSVSDEFGVVNQIEHLGRSYTGNNISTYKILNKWQIVYTKSPLKLKPFGIIKVNNNKPGIVSVLYAIYDVKEGFDPNYISVYFEPNFRLNKYLLPLINKGAKNTINISDETALSGEVHIPLSYTEQQKIASYFQSLDSLIQTTSKKLASLKRIKAASLQSMFPQEGETVPKVRFKGFEGEWDFVTAGEVFKTTNVRNRPDLPVLSATQDKGMVKRSDIGYQVFHDKSNETTYKHILPGQFIIHLRSFQGGFAHSNIEGIVSPAYTVMEFKNKEFHYDYFWKYIFTSKEFIKRLELITYGIRDGRTISFDEFKEMDFFIPSKLEQQKIASYFCNLDKQISLQTQRLEKLKQIKAACLDKMFVMNKQQLANKIWASANKMRSKIEANEYKDYILGLIFYKFLSDNEVNYLNSIGWTDEDIVTLVEDHENQEAVMMMEYCRNNIGYFIEYQNLFATWLKPNSEFSVADLSGALSSFDRLISPHYKHVYENIFKTLQAGLSKLGENPASQTRAIKDLIKLIKDIPTDGRQDYDVLGYVYEYLISNFAANAGKKAGEFYTPHEVAILMSEIVAEHHKNKDKIEIYDPTSGSGSLLITIGKSVGRHIEDKNKVKYYAQELKENTYNLTRMNLVMRGIKPDNINTRCADSLEEDWPLQTDGGDIGKPLYVDAVVSNPPYSQQWDANDRELDPRFKDYGVAPKSKADYAFLLHELHHLKPDGILTIVLPHGVLFRGDADENSEGEGKIRRNLIEKNNIDAIIGLPANIFFGTGIPTLIMVLKQHRDNDDVLIIDASKGFVKEGKNNKLRECDIKRIADTVRDRKTVPGYSRTVSRDEIRQNGYNLNIPRYVDSSDPVEKFDIYATMFGGIPHSEIDELQKYWDTFPSLREELFIADADKPYSQLKTEDTQSFIEQNADVKAFQQMFAQAFGGFADSVHHRLIDQIATANPQKELDAISDDIFARLHGMPLIDRYAAYQALADNWQGITNDIETIQQEGIEAVRVVEPAYKLVKKGDEEIEVPDGLKGRIIPFDLVQQEKFQDDLKAIADLQMRVEEISGELDEIRENFSEEESEAYLDSEKENAFDKKAITAGAKAKKDEVEAETKEKLKKIVKLWEEQKNKNKQIKEAKQTLIDKTVKAIENLSDEDISLFLHKKWIDPIVYGIDETLAEVLSTFEDKVCALGKKYAVSYKHLNEDVEKSQKELSGLINELTGDEFAILGLNELINDEKKMPNKKINRIKVMLAEKEKTNKWLAEQVGKDPATISKWCTNTAQPSLEMLFQIAKVLNVEVKDLLRESDEMNDNIEYEKFTQEIYNEILKNLYVKNIDVKHNVKLTGKSGQKHQIDVYWEYQYDNTTFKIVIECKNYNHTVSIGKVRDFFGVLYDLGDVKGIMVTRKGYQEGAKKFGEHYRIDLMELREPEEGEAIVAETTLTIDSPVRHRLFQVDEDWAKAHDFNIQLYKKRLDCLSLSPSSNKWINATHIPLTTKENKIRNAKDEIITDIQKLEEELPENCEQNKDYVFPFDDAYIKTDCGNIKIKEIKFEYENHTETKQIKIDAQNITKAILKNTISKEVQLIGKTYMDYKSQMKMKEKNQVVPDEVLSKEFLSQFKTEADVSRFLNQLHAQVLEKMLEGEMDAHLGYEKNSVAGNNTGNSRNGSYPKKIQTGHGESVISIPRDRNGQFEPIAVPKHESRGLSIEKLVISLYAKGMSVSDIEEEMREIYEIELSTSAISIITNKVSQAAQEWQNRPLDPVYLIVWMDGIVFKVRDNGKIINKTVYLCVGLKQNGLKEVLGMWVGKSESSSFWMGVLTDLKARGVQDILITCTDNLNGFTDTIRTVFPQSSTQICVVHQIRNSCKYVVYKDKKEFTADMKNIYNAPNKEVAAAELDNLEKKWGGKYPYAILSWRNNWDDLTVFFQFPLEIRKIIYTTNLIENLNGKIRKYTKSKLSFPSDDAVKKNVYLSLMEIEKKWTMPISNWGLIMNQFMLIFENRIQIMNYSDFIYDFNLYLCERFGYRNCCSVIHNANGICVSVHVGEMDLYIRFWEYSCGVGSIPDWSIIIVRSNFKRNQQENLKDLARFFKEYAPRYGYKYLCTEDDDYKYYQTLGLKLIHRGFFRQYNYGLSLKELEVMIGKIVKGTSFSGCVNYVLKEDKSRLLKAVGVYGSPEEIAEQFELQTLLNNKVKNKVGHISLSFSAEDGDRIRDDDGLMLKIAHDYMKLMGIVSTQFIIARHTDRNHPHCHIVYNRVDNDGRTISDKNDRYRNEKVCKMLTARYRLHFAEGKEHVNFMRLRHHDKVKYFIYHALKREVPNARSWSELRLALRKYGIDTQWKLSRTTGEMQGVKFTCDQLTFSGSKIDRQFSYLNIDQELRYNALSATMNRQVQAATIREEPRHEYQQENHSGISVGLFTPSPTDYDTEEAIQANRLKKKKKKPKRKRGFSLMDKKNTVTIRLTDEQFGWLRALSRRSKRSQSEVVRSLIEHGTVRERITRENLDIIRKLIGESTNLNQLARRANAYGFYRVADECSTAIQQISQLIKQLKDDRMNYRFTLEPYKGVSTRHTCPNCHRKSCFAKYIDTEKQISFPDYVGRCNHEQKCGYNYTPKMYFDENPMAKERLSEEFAPMSKPRISLPPAPSFIEPEIMRQSLKLYHTNKLFQFLSFHFGQEATEELMLRYHVGTSKHWPGATVFWQVDISGRVRTGKVMLYNPENGRRIKKPHNYITWVHSLLKKENFNLRQCLFGEHLLSSDQQRPVALVESEKSALISSFYLPQYLWIASGGKNGAFNRDAMSVLRNRRVLLFPDLGATDYWNSKMEMIRSLGIEVSLFDFMERNATKEERDAGYDIADFLLREETKDAIFNRLITLNPALKTLVETFDLQLVNVEKAPLSATVQHTRKGLFKRMETSKLTAEGIIGEAVRIGAKMSGGEFPIEVFPIRIQRIISSLHDCQGYPVDYVAAAILAAIAVGIGNSHLVQVKRNWLESPILYMALIGRPGANKSHPLSFAFQPFIEHDYCQNQEYQKLYAEYERTMSMSKKERMEAGLDEFPQAPVRRRFLVSDITPEGLSLIHAQNPRGLCLWSDELSAWFKNFNRYNNGSEEQFWLSVFNAKPTISDRKSTQSSIFIKRPYISVIGTIQKKILGELVKGERSSNGFIDRILFVMPESVLKSRWNDRETSEELEIQWQQIIDKLIAQDCSHDENNELQPQCLPFDEDAKQRLYGWQHENARQCDMETNDALVGIYCKLEIYIIRFCLIIQLARWTCGECDKRTIDLESVNRAILLTEYFRTTAVKMQTAVSQEQLSELHRNIYLNLPQRFTTAEGIGIAESYGMKEHAFKMFLKRHIGTLFRKENHGEYSKMANEQITFDKLPQAVGYLTEQMEQIRQMVAALQPQASSDKHRLIEIDEACKITRKAKPTIYTLARKGLIPAYKRGKKLYFYEDELLQWIETGRKQMRAMSLQEQAAEIVHGAKRKPKGGYNFMIRHTHFSISGNTIECIVYLECLKKVGNNVFDVYIDFRQIKDLNHFVQSNPNNQIFNKIGPTYIELLSLKTNKRLLTGCYYKLNIDLLNRFDFVENTESLFIKRSYNLNNMQYPGVDTEEILQKHTVLDPQELFRNKINGQFTIEELHNYNLKLCVRDVGQANWNELIDNNIVKYVYDIGAELHSKIDDVKKLFYERVDDYKRDKPILVLSHWDIDHIQCMLYVDIQTIRDCFSKCICIDMMKTITSLKIYNNILKALGKDNVYCIRPADRTNGITMHLWNRIGNIAFYKGEKSRNINYAGLCMFVSGKIKSANFTGDIKLIQAKYVYDQEKEFNSNTIDGHILVAPHHGGDYGKKARSYSQPTTDVVISVGAGNSYGHPEKYMLSYLQELCSNNINRTDKNGDVVKSIMNQKKAEYIALYSLVFGVILVFGILIRQFVLSKGIDDFSSTVAFFATVIVLTALYSSLQITFNQFLLPRIEAFLFCFSAFQKMKDNNDAVSFPEAPTIKDSNQATPDVIESAPTTEETISEPSEYEVMRTNAIAEKNRAIQTKLEKVLNYTKQTMVAYMSEEDLNRLCAYVAEYSSGDTLQKISPVKVDSQLKSVDIMHFGWNIGKAFSKKRIHTATFIKNVFDHTLRDLEISTIERKMSHTESVCKIKLDMNIAKMANHYSTYFNITHEDLVNRGVYNAFLDKDSLLHIDPLLLKDCTIPEFKNAYEDFLQYFRGFVALTNAARSKSTKDKFFKRIVDRYTLKEISNTGLGYSTGNTRGRGISGALSIQLAESTYDIIKAGMTDPEIFCLMQLIEDNMGPDRISDMTISILHEHFLAYTQRISAELKLPTKLYRYSYDLSFNVPFYQNKPILFIPTQFLCDLPYAIDYDDIDRVCDYNNRLKQKIASIIGVCWTECLKYKKSDWKSLICNNRDCYDVAIEYFKKIKGIPYDFNEDRKGQYKDILLAELLSKVPFLCNIEKSKNIKEEVYELSLAMCNQFKRLVEDLRLSELLYRKGRKPDETDWQLMLFMVADTYRNAGQFDVAISRESNPGVGELDFQITRGAKANTVVEIKRSCNKDLMHGYRTQLAAYMKAEQATSGIFMVIVEDDSIDYIKAQLNEVKKDMIDKGEYIPKVIFINGKHQPSASAPSYKNPTLMTLTCTNVTLRQKPLRNDRISLYLDYYPAIRNPYTMKMSRREFLGIYIYAKPKNEQQRMFNQDMLNKAEAIRCIRVQSLINEEFGFLDKNKQKVDFLAYFRTKAREKYEKWDCVYNHFEKFVGGKCTFGDVTVELCEKFRDYLLKCKQINHPNAYISRNSAAGYYSTFRALLKIAYKEKMLRENLNDFLEKIEWKEVKKEYLTLDEVKKLAATPCKIPVLKQASLFACMTGLRISDILKLDWRDFEVGPDQGYYIRICTEKTETEATLPISQEALELCGEWGTGKVFKGLTRSMTHHPLKQWIAEAGIRKHITFHCFRHSYAVIQISLGTDIYTVSKMLTHKNVTTTQIYADLVNSKKRETANKISLKMSSNIEIRRICAWCKQEFIAHKMTTTCCSHRCANLLYKQKKREASIKANNQIVEKVIKEKPIEKIRDKPILTITEAATYIGVTRPTLYGYLKRGELKASRLGYKFLLKKEDIDNLFNKPIEFKIPVRDKPSINDFYTTAEVKEKYGVKDSWIFHIAKEHNIPRTFHRGKTYWSKKHIDDYFAKKAPDPEIKEWYSTQDIQEKFGMTLTAIYSFVSKNAIPKKKVGIMVYYSKKHVDIAKGLIAPEEPKYYTIAEAMERFNLTRDQLYHYVKYHNIPRIKVGKYTKILRAELDKFFEPPKIEMCTSPRKSEDYRWQGRGELLRHFTGFYGVIQKYWRNKEKMESENIRESILDFTARLGEINPDMPYLCRRGLSGPERAVFAFFPSVRRESMKKNVKSSIFCEKTSKFLSSLPFKVMKIQSVHIRNYRKLKNCHIDFGEKETVLVGANNSGKTSAISAIVWFLKNTDRFTLKEFTATNWASINEIGEKWLEHDSVDEALLSSHQWDNIVPSMDVWINVEDGEQYRVNHLIPSLISWDGKKVGVRGQYEPTDIKKLYTVYKEAKLKAKALEDTEEWEKAGSPELYPKNLCDFLGKGLNLREYFDVKYYIIDPALDPDNEDEVQITPDNEIGNNPLDGLIKVDTILASRDLSDPEGQTDSDIDTLSKQFQQYYKSNGQEDEELTCEGLKLLGGIVTANKTYDEKLKKTFEVPVGELKNINYPGFQNPEIKIRSKIQIEESIKHDSAVQFAIQGMEELALPEKYNGLGYRNLISIYLKLIDFREKWLKGLSEGKNIEPIHIVFVEEPEAHLHAQAQQVFVKKAFEALCNNKLIEANPWLSTQLVLSTHSNHVVNELDLNCMRYFKRVVDVGGKIPVSKVVNLSNTFGTDDETKQFVTRYIRLTHCDIFFSDAVILVEGPAEKILVPSFLEKAGLDSYYISVIEVNGRHAHSFRKLIGKIGIATLIVTDIDATETKVMITAKGKGYKTGNPSIKSWLSGKEQIDDLLALDGKEKLVNNVRIAFQTPVNVKWDKNKDDVTEVCPYTFEDALIFTNLELFRQEGLKKMGAITTIANLLEHSNSANELQNEIFKKLESKSGFQKADFAISLLYKDDFVDLVAPLYIQEGLEWMKLYLDSNGNSNGKMGNNIDLQVDETLEKCILSTPRKSFFLFAGAGSGKTYSLVLLLKKIHNSIGKDLLLQGKNVAVITFTNAATDEIINRLDYSPIFHISTIHSFVWEVIKYYQSDIKRLYCSYIEEDLKALEKKIKETKNKTTKTYLSSVEKLECQKERLAKAQTIEKFVYNPNGSNPEYNALKHAEVIRISARMIIESRMLQRIIAQRYPILLIDESQDTKKELVDVFFEIQRNFADIFTLGLLGDQKQRIYADGKENIEDSIPTEWEKPVKRMNYRCAKRIIQLANDIGKDIDINAEQRPREDANDGFVRLFIIQQRDGLNKDEIEQNVMRIMSEQTRDEKWAAIDADVKVLTLEHMMAARRLGFSSFFAPLYKVSKYQMTFLQGAVSEIEFFTKEVLPIAESIKEDGRIALEILKKHSPLLSGQDTKNPYELYLKCREETIKVANLVNENETIRVVVDEIIKSQLLIVPDVVKQAYMLNPSDIENIVEEDIRAWVEVMDLPINMVRSYDDYVNHRSQFDTHQGVKGLEFDRVMVIIDDSEIRGFLFSYDKLFGVKDLSDADLKNKENGKETSIERTQRLFYVTCTRAKNSLAVVMYTNNSEGVKTETIKKGWFEESEIIVMMVDLCLRQILMDRLTLRDYAAGDSVSWMDIRRRLMLNEREVDPTIPDHLYRSALVAQVDEQGIDSLSKLLTQGLGNLASLYIQEKNSIMHIKSERFEQWQELLTFCPPLPLIAAFFWGKYKETTIIPPSCFQNIKYTALLSPDISELNEQKKYSKGFNDLHIHLNGSTETDIVWQDALNNPHDFRKYYKQSLKNQRVREQNEQEYVFKDADELSKLLQYARALRYYFTLIIAHNDHAHSQEPTPMFPDSDILIEQYGANLIRGQHPLASCKDTQPTDTDIIYECKLYIQILNLLADKQAEQRYPKLAQGFHHYLLILGTMNRFLVQQIRQNGFQQFQKIADNDLRKYSESDYHQRFFQLCGNCLDSPHFNILEGRFAPKKTPKDIASLINRIRTGWQQFVQDEKLKENYKPELCLVAHFIKKPVKKQGDSFYHESLRSQLWIQTQAILSLWTDPIWQQCPIDEHSGESVDQLLNLQKFVGIDAAASEFDAPPEIFASAYGKIRRTLSNACHFTFHAGEDFSHIVSGLRAIYEAIQFLPLNNADRIGHAVALGLDYALWKERIGDHIWMKQGEWLDNLLFIYHLYQEDHRTIPLNITESIKKHYADIYNKSINDIDDAIVAWLNRKWNPIFIQSSSWIDLSYKETFDSAEWDAFQEANLTPAVKAIMEDYWMHRENCSGNNSYDKHILVDLDNNFLEIVDFAQNSLKQIVRERNIVLEAPLTSNVRIGIYKNYTEHHLKKWLDQGLNVVLGSDDAGIFATNIYNEYAHAWLGQSIRRNHIKRLIANSETYVFNNKDSKMTNKQIILRPEQDIHEQVFTGNNIVHQAELQQVLDLIDQFIQEANQQTLLESTSNTKSITDKRRVHHTITLSGSRGSGKTSFLKTLIDKIKSQPDKYKIEILDIVDPTLIEEKGHIFLNIVARVKERIDVLVQDKEMSIRQSWEYKQWEECLNSLAAGLPMLDGINGGLDPSDWNDTTFVMRDGLRRVSGANRLEEHFRHYINYSLQLLGQDFLLIAFDDVDTDFSKGWPVLETLRKYLTAPNILTFISGDLDLYSFLVRKKQWKNFGKALLKNEYDKPETIYTAKYPELVEQLESQYMMKLLKPEYRITLSTLASKLATKKIQIYINNNDVNNELGKYYSKQLEDIWGISGSMTQLSYVRFFTSLPLRTQLSLLQLFSIAQNQKQDLRIKLQNLAKGISDVFYNELHYTKVDIWELLNEYGLANIYLLRFLLDNNVLDEASQFFPKLNNPSLDGSVVALGAVLSEKLTLKPYELFDHIIRVSNIVAKATRWPMVGTSPNIHDFVQHSRSLFDYGLKKIASLQSAYIMSFNNEDAVHNGLIPIRSLQSKSKNKRDENDLALDEVFDHTNNAEIVRLLGLLPAFGAQDPLGRNRLFYSFYSLIGAIGDIILNENMLGIQNELIRMAQLREFPLAFNQNNRNDITDDIEDYNDPEYVVADNSIAEFALKIRQWQENWQNYTPYVIPPYLLGRIMVRTVYSFMRIQPQPNQKVADLFHRFLVVFLNAILVEEAMERDATAHMTLTNPTGSDKIFFNNYNEKTVSCPLFEFMLSCPLIQAYLDPALLDQTTNTHPVYSVYNYLNRLNISGAIKQHREQPIKIDAYVRANNQEHIDALMHYFQQIGLSKEQLSSDQVKKAIKTIFTNKMVYNQVVTDVLNAVKNSSKWMIYRESNFIFNYPRLPRLKNVFIYYIQFLEELNINSYIMVDVARVNLYGQPIGSVRWDQRYEIAQFEYDPDFVRQGIEPSPLMMPVREGRVYSFGELDKTTFKGLPGMLADSLPDTYGRALFERWLALTGRTSGNAIETLCFLGKRCMGALEFEPAIDAVDTDIRIEVDSLVDVAREALADKSSFNVNISSDKKAAIAEILRLGTSAGGQRAKAIIAYNKTTGEIRSGQVEAPDGFDYYIIKLDGVSATAGFRETENFGRLEYSFSRLVKECGIDMAECSLIEENGRAHFLTKRFDRINGAKVHMQTLCGIAHFDYRLLRAYSYEQAFAVMRGLRLTYKEAQEMFRRMVFNVVVRNQDDHTKNISFLMDRGGKWHLSPAYDMGYAYNPDGQWTSAHQMSINGKFSGITKDDLLECAAKNNIKNAARIIDEVCQAASMWPEIARECEVPQKMIEEIRPNMIFFMLDNIYILTDTELCNRIAAKIKTVRLKQNMSQAELADKSGVSISTIKRMEDGEVKNFESLIRVLRTLGKLDIFVPLVEEEQLSPNEYYELASKANKPKRKRASKSYTKENKEESEWMARKNILQPKEKWLRPFLWRSHLFFSIILTLLIEYIGIQMIETFTVKNYRSYRDKAELSFVASKKEGSKTNDLPPIWYKEINGKRILRLLLCVGLNGTGKSKMFSALNYLRMIATAKPQKPSDKPEYRPFLLDKSSSTQPTELSLIYYIDGTCFNYDIKVSSECIEEEELKLVQSRSSRIFYRYHNKELDKVVINYGSACDLSKSDQHDLEVNTLANASVLSTFGALNLESQILSKNFDYFENHISMIHRSDKSLADKLQTGDPEKDRVLKNLLLRLLNDVGTNICDYVIEEASLNISELIANGAPDIVIKAMMEQYPSGVITHKNLRFIHSTKDGKSGLDFDLESLGTKNIIRLLVVLYDVVVGEKSTCIDEIEYGIHTKALAFILKMYLTIAENCQLIVATHDLSLLNADFLRRDAVRLFEKDEHGSTCVRRRDYLHKTISFYKTYEKEVSPQLDELMRKIEIFIKYKDDIMEMAKLMKKTKSYTFIDLFAGAGGLSEGFIRAGYTPIAHIEMNKDACNTLKTRSAFHYLQKNGMLSIYEDYLRHKEEGTDGRKLWDQVPKSVINTTICATIGENAIDDIFNNVDELKGKRKVDIIIGGPPCQAYSVAGRARMGKEVENDPRNELYKYYVRFIDHYDPEMFVFENVLGLLTAKRGEPFADLKRLVDKLGYDMDCRVQVASQHGVLQNRQRVIIVGWKRAVKGSKSPYHYPELPEEKCPYQVLRDLFSDLPPRKAGEGKFCEAVSYVKPLSEMPYLDQSGIRGELDFTTQHVARPTNENDRKIYKIAVERWLNEHHRLNYAQLPAELQTHRNKETFLNRFNVVDPYGCSHTVVAHIAMDGHYYIYPTLSPTLETVRSITVREAARLQSFPDDYYFEGSRTSAFKQIGNAVPVVLAQRIAEAIKKMLMDFSSLKTAPAIPGAAAMIETFRAIGYSLETAVADIVDNSISASARNVWINRIWKGGDSIVTIRDDGHGMSGDEIIQAMRPGAQNPLEERSATDLGRFGLGLKTASFSQCRTLTVMSKTQGQSSEFWTWSLDHVAQCDRWELVHWLPEGFEHELDDLASGTIVIWTNPDRIIPAATKAENENAKRKFSEAFDRVRKHLSMTFHRFLEAKSVAIHWGGHEIDPWNPFCPKESKVQIMPSEQIGEQVTVKGYILPHKNNFSSETAYRQAEGIFGFSAHQGFYVYRGDRLLLAGDWLGLFRKEEAYKLVRIQINLPNSVDSDWQIDIRKAKAAPPVGCRQQLESYARQACNKGSEVYRHRGRILRQRAGQEFQSLWLEKKKDNKWSFVVNREHALVRNIRELAKENPDQAIDMLLKFVEESIPAKTIYVREANDDDSQKQPYSDMDPGLLRTMIKQIHERQLDQGLTPEQSRLALKQMEPFNEYEDLIDELQMNELNEKAINMCQVMIGFKPGVSDGDIDTAISTVTSLPMFAGLNKIELKKSLLSIYNVKVDTYQILEGRDARIPWLKEFKAECRSEWLFWTRYKKYLAEQKHFAPEVIFQLDDLTDRILDKLFNPQRSDVIINKKGLVVGQVQSGKTANYTGLICKAADAGFNLIIILAGIHNNLRSQTQTRIDEGFLGFDTQNTRAYNMNQTIRIGVGLIPGFDKAIANSYTTSTERGDFTKQAANTAGFNFNNPQPIILVIKKNVSVLKRLYSWLKSQSTHDVIANKSLLLVDDEADNASINTSRAGDDPTAINGNICKIIKLFNRSAYVGYTATPFANIFIPLNKDDLFPKDFIINLPAPGNYVGPEKVFGTSANPDEDDDLLPIVFPVTDSDTFVPAGHKRDDPKPTIDDIPESLRTAIKCFIVTCAIRIARGQENKHNSMLIHVSRFQAWQNHLKEIIDRLFKYYKSEIEANDPTMLEELRQIFEEDTPDYRSYRTITGEIIESPVLSRIDNKIRSHTWEEIRPLLYRAVQKIEVKSINGTSGDSLTYYDNEKNGISVIAIGGDKLSRGLTLEGLSVSYFLRASKMYDTLMQMGRWFGYRPGYVDLCRLFTSNELNEWYRHITLASDELREEFRYLAESGGTPENYALKVRTHPGQLQITSISKMRHTKNIQVSWAGRLVETYQLLRDPASKRNNLAATDSLLSELGTPDRIKNDYLWTGISSDTVCDYLSRFQLPESLTKVNLDLICDYIRELNDVGELVSWDIALMSKNADGNTCVHTFSNGVLAGCFIRRQAQDAQNAGTYYIRKNHIVGNPTDEFIDLPDDMLSKALDETRGRKTRAKEEWKHEYPSPQLVRQEFRSKQTPLLMIYPLNPEYSNMSGVKDAVSYTKDDEPFIGFAIAFPHSDTDKAISYVANQVADFAITEENFDSTNDNTYDEQMMNNNSITDIWNNLASAEEAGLTKRRIPVESPLYVYGTYRYPDNLYGIAFSYDSRLTIPVDQFKSLKELGILQMPDTSFEHRNLLLIQLHHTDCLGVFSTLCSDLTSAVTRESSEKSALRIVLNQLEKWRTLFDRGLAAGLSPSEQQGLYGELHLLSRMIRRNTSDMTETVGYWVGCDKAMRDFQGEDWAIEVKTTATNGSDRLTINGERQLDDALLNRLFLYHLSVEVSRKNGQTLNRAIEDLRKALATDTIALHRFNTGLTHAGYFDEHAPMYQDRCYKIRWEQAYRISGDFPRIMERDLRNGISNVTYTINTSACEEYAVTDTDLFKSTVDHERNMQDVVAMQSGDEDGNTQEQIFTRICLDMLSDAAETENVSVAYDERDLKKKGQHKINGYAISDNYETVDLFITLYANTTEIRTIPKSEVDTASKMITNFFRRAVYNDYVNEIAESSEIFEFANTLANYAELRENLIRVNAFILTNGTYKGELPASQVICGYNIYYKVIDVEYLYKISEQAGVPIELDFENLDGHKYEIPCLAANLSNPDYEAYVAIISGECLAKLYECYGSRLLEQNVRSFLQFTGKINKGIRETIKSEPHMFLAYNNGIAATADHIELDETRHFIRHISNLQIVNGGQTTASIYNTAKKDKADISDILVQVKLSVIKDKDQYAEIVSRISRYANTQNKVNDADFSANNPALVEIERISRYIFAPATPTNNLQTAWFFERARGQYKTLRAKEGFTKSRQKAFDLKYPKKQVVTKVELAKYVNAWQETYNGRNLAIGPHIVVRGNEKNYARFINYNLPDVKHIDVAWFEDTIAKAILFKAADKRYGTKLTGDHIGELKQVVVPYTLSLLNIITEGRLDLYRIWKNQAISSALSDFIYDLMKQVNEFILKESPVSHYIEWAKKEECWLKVRSNEWAYNLDEIRQDFIDEKNPPKRNHKSDVGDEESDRRHKEGIIRAIPFSLWKKIETWGRDTGMLQPTLTSLASDIAYKIKNNRKLNDSDISRGYLIYENVWQHNSELLEEADSLAEQDCAKAAETSDTISPANGQDEITLELIQAMVEWDNRRRILEDWKWKAMKDVADGMKPLTDRMKYAFYFNLQKLKKAGFPNMSQIKNKDTKPEVTLRKALFARGFRYRVNVKTLPGKPDIVLPRYKTVIFVHGCFWHGHPGCKYAYTPKSNTEFWVNKISGNQERDAVVKRELEEFGWKVIIVWECEIRHGKDFAGLIDRVSVDVLTQMKQAHKKRPHLAAANSPPELPDMGEIYFINLINLRRKRERHTPYYARKNTTQTKIQISKTHFPCFLNANTCVNRKNIVALHCQLEIKTLAKGPESMIAKAKAISYGINDLRYITGESKHKKHPEKIYRVLDNLLPPELDAMGIWNSMQLTLSQYRPIKNSIIRIELSPSPEHTSFYDIEDWQKLWHEFAEEFDKQTITGKDGKVRSCPTNLANSKYTVYLHMESKGKVPHLHAAICRFDKNGNINNDHNIHLRAQRAAERVAVKRGWKTAEEIRSRNIPEVSRECMEVLRTMPSWSWEEYKKALARRGYSVYERKDKKDVLRGYAILKGNTKYKASELGVARNLMISKLPRTWQKLHYRERLAAQVNTSQSHRPEPVQRPAADMDYTHYRSGSVSYTLSSHGGREQRFYIPERVLDYFNEEFDYREVANSSELTDIAVAIFVGMLDTPAVSAGGGGGGSQSDLPWRDKDDDDLQWARRCARAATLLLGKKSRTGLRRMEHETIEQNTASDAKRTVFIGAKVTPQQKEEIQARAQQCGMTVSNYLLSRAYGYAPRARLTREEAALLQELDGCRSDLVKYTSALQGMSTSQRLTLFNQVPFMAGWFHKLRSIAEAVSDFLTAVREQNRVPSTPKPEEEKMEAGKSANVQPQRSEVIPWHILQHFVSGFGQRPAPDIQGMETTDNHTPTPEELALCIEESAVRAADACEQSPAVLRVDGSVIGTLGNFSASIGKAKSKKTFNVAALTAAAMTNGTVLHYRASFPEGKRGILYIDTEQGRPHCQQVLRRILRLAGLPEEQDPDNLVMLTLRKFPPDMRLAIVDHAIGTIPHLGLVIIDGIRDLLYDINSPKEATDIISRFMQWTDDRQIHIHTILHQNKNDENARGHIGTELNNKAETVMQIEVDKEERSISVVEAIHIRDREFEPFAFRINSETLPELVEPYQPRKRGAGRPAKGPFDPARDIPEDVHRAALDAVFAEGSIGSYRAYQERLKEGYELQGVKFGGNRATQVAAFLREQQMVIREDNVYRLNPDLRIMAKDQLTFNDLPTVVGELCDRIASMENLLSENISRQNAPQENTHVPMTVQEACEYLRMPLSTFYYKVKKDNIPVIKQGKHLYIYRDELDKWLESSRKTPPAQSFEEENEALIASHRRKPNPKIWMANTLQKRAKRISLVLTLAAVLFTVVDNYLYLCHDINITPVATPVIIILVVSIVLCGVLQRYFYRWLIKYSLFPSANRQKLEAAKTERTRAAVTEQAENRAETIGIVPVKEATRVETGITAGPHRDPYMERYNQLLEEMKQQEARRHAELMEAIREYVTVATAPFLSQKALDTLLTNIEQMACGRTDSCLPLRSNPERPLRSPELRHLAWNIGERLHLSLEERARFIKLSFPHELNNATVEYLQRNLRVAVPSHIPIDIPDEDDFRFHLELIGGHRKKMTGGFRPGLTDKVRFLFENRTKRVIVSVTAATITLFFVTIRNYDYNFTSVTITNSCGYGMHECKTVTLRTRPLKGRMLSFYLDYYPGYRDKETMKVIRHETLGIYLYADPKNKREQNFNEVMTEKAEAIRCRRFESVVNERYDFFDKYKLKADFLEYFRSQLRKHDPKWEFVYLHFRNFVHGKCTFEEIDIDLCNKFREYLLTANKLKRKGRITRNSASGYWSTFRGLLKIIYRNGLIKTNVNDFLDKIETEDVVKDYLSVEELYKLAETPCKKPVLKTASLFSCMTSLRISDILALCWEDIVDYSAGGKCVHIVTQKNRTEDIIPISEEALDMIGYSPDKRGMVFKGLQRCWTQTYMKEWIRSAGITKNISFHSYRRTFATLQAAAGTDIRTIQSIMAHKSITTTQRYIKVVDANKREASKKITLMRKKMQVRKICQWCGKPFIAQKTTTCYCSHQCSNLGYKERIRERRRQLKRAQELLQPRQAAEGQDFFSFAQAAKLMGVTRQYIYKLVKESKLRASRLSGKKSLIRRADIELMMKTKPYERIMPKDDFDITEYYTAEEIAQKYKVNTKWVWTYTRQHKVPKVRIRQFNYYSKKHIDAAFAKYEVDSDLTEWYTPEEIQGKYGMTRIAIRSHVYRNNIPSKKEHGQIYYSKLHFDLSKSSAEESKAEYYTVKEAMERFNLSRDAVYGVLQFHQIPREKNGRFVRFLKVEFDRVMGVKKMELKLNKPIPEDTICAISTAPGMGGIAVIRISGTNAIIITDRIFHTANKKKLSEAKPNTAHYGTIADENETPIDDVVVTLFIAPHSFTGEDTVEISCHGSIYIQQQIISLLLRAGCRLAQPGEFTRRAFTNGKLDLSQAEAVADLIASTSAASHRLAMQQMRGGFSRELIQLREKLLTFASLVELELDFSEEEVEFADREKLTDLASEIERVIKRLSDSFTLGNAIKNGVPTAIIGETNAGKSTLLNRLVKEDKAIVSDIHGTTRDVIEDTVVLQGITFRFIDTAGIRETHDAIENMGIERTFQKLDQAHIVIWLIDATGSTQDIEKIAGRVLPHCTDKRLIVAFNKIDKIGSATQQQLTDLYKRLTREKPNTSFIFLSASHDQNIDVLEKQLTDTIQSTQTGENDIIVTNARHYEALLNAHDAILRTLNGLQSGLSGDFLAQDIRECMHYLGEITGQISTDEILGTIFSKFCIGKMAKKRKKKKSNSKKINNWGALFLLLLVTYSIWWLIKQAQQPQNPQQSFTNSLCHVKDAEMAHTPEGTPEQILYRTGYTVSYNSHWKQPNWVSYELLQDELQGSATRNNRFTPDYDVVGTMIDTRDYTYSGYDRGHMAPAADMKWNETAMEESFLLSNICPQIPELNRGRWKELEEQIREWVQRDSALLITCGPIVSTPRKTIGRHEIVVPARFFKVVAVPYTGTPRGIAFIFDNEAEQPSLKELAITIDSVERVTGIDFFHNLPDSIEHKIESDLSLEIWNLNMNLVDRFLHYVSFDTQSDELTNLTPSTPGQMLFAQKLAEELERIGLTEVTLDDNGYLMASLPSNIDKDVPVVGFIAHLDTSPDMSGRHVSPRIVKNYDGKDIVLCAEEDIVLKPSEFPELHHYIGQDLIVTNGKTLLGADDKAGIAEIVTAMEYLLKHPEIKHGKIRIAFNPDEEIGKGAHKFNVKAFGADWAYTMDGGEIGELEYENFNAAVARVTFKGRNVHPGYAKHKMINSIRIANQYAIMLPRWETPEHTEGYEGFYHLISFEGSVEKTVLTYIIRDHDRDRFERRKKELEHLTRKINNEFPGCASIEINDQYYNMREKVEPVMHIVDLVSEAMRAVDVVPMVKPVRGGTDGAQLSFKGLPCPNIFAGGLNFHGRYEFVPIQSMEKATEVIVQIARMVAEKMSGTLIVLTGPTGVGKTELSLQLAERYACPIVSADSRQFYGDIPTGTAAPTIEQLSRVEHYFVGQLALSDYYSASCYEEDVLKLLDKLFKANDYVLLTGGSMLYIDAVCKGIDEIPTITDEIRREVVAHYEKVGLAVLCEELKVLDPVYYAEVDLNNHKRVIHAIEICRQTGGRYSDLRTRRVKSRPFRIIKIGLIRPREELFERISQRVEQMIADGLVDEARRVYPYRHLNSLNTVGYKELFAYFDGKMTLEEAVEKIKRNTRVYSKKQVTWYKKDLDMKWFSPDDKDGIIAYIDENSVLMRILKPFMLLAVIGVLYSCAAVPLQTYRNGYIMDKNNVVVGYYSNGHVLDLEKNIIGYYANGYIYDTRHEVIGNYVNGYIKNLKLKMIGLISFLAPLILGQAPVVPATEVSLLFAGDAMQHKAQIQSAKQGEAYDYSPCFADITHEIAAADYAVVNLESPIGGQPYTGYPCFSAPDEFPIALQNAGFDLFLTANNHCLDRYTRGAIRTLHILDSIGADHIGTYDSKDSFERFYPFITSIKGIRIAFLNYTYGTNGFTPHSPLIVNYIDEEKIKKDIFRAKTLSADLIVVCLHWGDEYQLLPNKRQEDLADFLVKEGVQLIIGAHPHVIQPMELRYDEQGNPCALIVYSLGNFISNMKTRDTVGGAMVKVVIRRDITGKILLQSAQHTLVYTRRPTIQKENFRVVPAIQELKEHPHRPHLKGFVEKAHEISSKYNKGVTEYQIEPVNPTFKMQLIDGKAVADRIKQEIAQEVEYICSAGGKRPHLAAVLVGHDGGSETYVAHKVKACEQCGFKSTLVRYESDVTEEELLNKVNELNNDPDIDGFIIQLPLPKHISEQKVIEAIDYRKDVDGFHPVNVGRMSIGLPCFVSATPAGIMELLARYEIETKGKHCVVLGRSNIVGKPVATLMMQKAYPGNTTVTVCHSATPNIKEICRTADIIIAALGSPEFVTADMVKEGVVIIDVGTTRVPDATKKSGFKLTGDVKFDEVAPKCSFITPVPGGVGPMTIVSLMRNTLLAGKKAIYPMFENLSERLERSFKILKGEGKITEINVAETLKDVRRALLDADVNYKVAKQFTDTVKTKALGQDVLTAVKPGQLMVKIVHDELATLMGGETAEVNLSQNPSIILMSGLQGSGKTTFSGKLAKMLKSKKGKRPLLVACDVYRPAAIEQLKVLGEQIDVPVYTEEDSKDPVSISANAVKYAKENHFDLVIVDTAGRLAIDEQMMNEIEAIKKKINPTETLFVVDSMTGQDAVNTAKEFNDRLDFDGVVLTKLDGDTRGGAALSIRTVVDKPIKFVGTGEKLEAIDYFHPARMADRILGMGDIVSLVERAQEQYDEEEAKRLQKKIAKNQFDFNDFLSQIHQIKKMGNLKDLASMIPGVGKAIKDMDIDDNAFKSIEAIIYSMTPKERSNPELLNGSRRQRIAAGSGTSIQEVNRLIKQFDQTRKMMRMVTQNKGAMMKGFKRRMKKFFQVLGIVTLLLVGLYYIEECSGKKDQSEAVEDVQDDLEMEKSVHLKFKGVPIDGTLKEFISRMERKGFEHRSSYDSKERLVGDFAGIKQCTVYVETLDNSDLVSRIIVEFPKQERWEELFDNYKNLKSMLMEKYGNFSSCVERFQNSYIRTDEDRMRAVHMGECMYKTNFSIAEGDITLSIDYEEWRQGFVVLKYQDKINSAIIREAAIEDLMKANFPEIYELYRQGDVIITSVYTYEKDGQERVHIEYRYRMYSRKEIWRISLPILVSLFVQNLINITDTAFMGRVGQVELGASALAGVLYLAFYMVTFGFSTGAQILMARRNGEAKYGTLGPIMGQGILFLEIFSIILIFASLIGTPQMLKVLISSTAVCQAGEDYMQYRIFGLLFTSIGVMFRAFFVAVTRTKVLMMNAVIMTVANVIFNYIFVFGHFGAPEMGIAGAALGSVLAEATAALHFFLYTFFYIDRGKYQLFRFRSGGFGLIREILNVSVWSMILYFLTIGTWFLFFVAVEHLGELPLAISNIIRSTSTLLFMPVNAFGATACTLVSNAMGACRADDVIPIMRRIVKMCYAIVLPLIALLCLAPHWILLIYTNDSSLIAECTHSVYVMSSFYLIALPGNILFQSVSGTGDTRTAFLIEMITIVFYTLAIYWIIVTLQVDIAFCWTVEYVYWGFKLFLSFLFFKKANWKVKKIMFIEVVKSKIHRVTVTQANLNYIGSITIDEDLMDAANIIANEKVSIVNNNNGERFETYVIKGERGSGVICLNGAAARKVQPGDIVIIMAYALMTPEEAKSFTPAVIFPDTATNKLIMKVFTTIAELCKQLDSDRNAGKKIGLVPTMGALHNGHLQLVKTSVANNDVTVVSIFVNPTQFNDKNDLLLYPRTLNKDCQLLESVNCDYAFAPSVEEIYPTEDTRIFHLGKVAEVMEGKYRPGHFNGVAQIVSKLFDIVNPDNAYFGEKDFQQIAVIRAMAAQMGYTFNIIAVPIVRESDGLALSSRNTRLTKSQRRNAPKIAETLFKSRTFAASHSVKETIDEVISTIDAIPEMRVEYYEIVDGNTLQPIAGWNDSDYIVGCITVYNGEVRLIDNIAYRRPEQMESNLKCFFLKGKYRASDDFLVLILLIFGGLRYFFYYLCRKMQKWAVSWHDRLNSFQATGMLFLQNKLSLRGAEMKEAKVLFIAQEITPYLPESEIANICRNLPQGIQDRGHEIRTFMPKYGSINERRNQLHEVIRLSGMNLIIDDTDHPLIIKVASIQSARMQVYFIDNDDYFQRNADGVVDEDMRPDNDERSIFFVRGVMETVKKLRWTPDIIHCHGWITALTPLYIKKSYAEDPSFRDAKVIYSLYDNGFKTPFDPNFAAKLKLEGIQDTDIPFAVGESIDPVVLNKLAIQYSDGVIQASRDINSEITDYVQKTGIPFLGYQDPENYIDTYNDFYNKIVGNEMKIFRFLPIAFAIVLGLSSCGDENSAIGSSIVDTNIEIVVDSSFQELITVESVPNDSVVGRTITQLIGRISIPGYGRLETDFLTQFMPAANFDTVGVNKLDSLILYLSYNTESFTGDSLAPMQLSVYPLDKRLESPVYSGIDPAEYYNAQAAPVALTSYNASFLGLPDSLIELGYKMIRVKLPDEMADRFYQKYKEDPTVFSSPSRFTQYFPGFYVKTSYGSGCVVNVQNTVMNLHYTKTTVINDKDSTYNSTQTLMAVTPEITTGNHIKLEIDAEIKNEISSGKVYLQAPAGLNVLIHFPTRKIIETFEDAVGGSGSASTVQGLVNSLTLRIPVKTVSSNYNLDPPQFLLFIRKSELQEFFEKKKLPDNVNTFYAKYDSDAHVYNFTGLRTFINNIIEKKRTGTEITDADEEIVLVPVSVYSETVSSGGSYYYYSYNEKEVVTDVVPYISAPSLALVDVDNIKLRLTYSKQDMKMGQNFGFVKVAAAIPRVEIADCIYNEREIYNQIIEAVHRNVQIIVFPELSITAYTCGDLFGHTLLLEQARKALSLLVEETSDYPILCIVGMPVAAGNCLYNCAVVFQSGKILGVVPKSYLPNYKEFYEERWFTSGISATIDTIELCGDRVPFGTDLLFESAGVVVGVELCEDLWVPIPPSSYLVQQGADIIVNLSATNELIGKHSYLLSLVRQQSARCVAGYVYASAGFGESSTDLVFAGNGLVVENGSILAESKRFSSTPQLVVSEIDVERLRTERRVMTSFAKGAWAHGRDARFIPFVLTDIPLRLTRKVGAFPFVPSDSLVLNERCAEILDIQSSGLAKRLVHTQAQSVVLGISGGLDSTLALLVAVRTLDKLGWNREKIIGVTMPGFGTTGRTYHNAMMLMRSLGITIREISIREACELHFKDINHDISIQDITYENSQARERTQILMDIANQTGGLVIGTGDLSELALGWATYNGDHMSMYAISTSIPKTLVKYLVSWVAENELVGEARDTLIDIVNTPISPELIPADENGEIKQKTEDLVGPYALHDFFLYNMLRFGFSPAKLYFLAQYAFEGVYEPDTIKKWLKIFCRRFFNQQFKRSCLPDGPKVGTVSLSPRGDWRMPSDASSAMWQKECDELMRKFYSAFRIFVHIVIFSIIAIYTLGYILLSIPNIQDKVRHIGIKELSAILDTNITIDRIQISPFNKLELFGAYIPDLNGDTLLYANKISAGISLSDLLVDRELVFTNIQLFGLDARITKETPSSETNLQFIIDAFKSDKNTPKKKINFKINNAIIRRGKIKYDILSAPIRRGQFDPNHIDLRNLLSKLSIKALSEDSVNISIKRLGFDEQSGFSLNRLQFKFEANRQQARLSDFKIQLPHSRIEIKPIIATLPDTLSAEHFYDQTRFSLQITKSLINPSDIAAFIPVLEKINTPILISMHLTGTPNNLYFHTFDFNFGKEDIIAHSQISVKNITNPQKRDILCDPITLNASSSGLADISSKLPFLTEEQCKTISRLGTIHFTGNISNQNQNLTACGTLETDLGSVHSDISINQNNSLNTTRYSGLIESKKFNLNGLFTEGNPYGEIIFKVELDSKKAKYQAPTGKVVGGISYFEYKGYPYENIMLNGEFGDNRYNGIIEINDPNGKLRVNGLSVLKDKDSEFDLVLQARDLNVSALKLMPKYKNSKLGFNVVAKFTGNNLDNAEGLLSIDSLSFTNNDDTFRLNKFNIEAHNQNTPQSIAVTSDYINGWIEGNYKFSTLQKSLQTLLSESLPSIFPFQENQPKKTEHKKNQQPNNFKFRFTVEPNIHMAQVLELPVTFTDRAIIEGEMNSLRNTALITGTIPHLWYKKSHIEDAFISARKDSTEMALFIETNSYNKKQIRTTWSLRSKAYRDSLDLVLNWNNDTQSTFYGELNTSTHFSRTHEGNKLQIQTHINPSTLIFNDTIWQMSPSDISYCEKQIEINDFEISHAPQYILIDGIASNREEDELKIQLNDVDLDYIFGTLNIKNVTFGGNATGNLLATHLLTGAPRLSTEQFDVKDFSYNEAIFGDLHLFSMWDNDNQGILMKGFIENKEDKQTYIDGYIFPTKDSLSLSFDPDKLNIAFLRPFVSTVMSDISGIASGHIDFFGRFKALNVTGDAYVENLDFGIEYLNTRYNLSDSIHLSPTRIWFDNVTIYDKLKHTAKGSGWIEHHNFKDVSYDIAITEAQDFLSYDMTERQSPIYYGTIYGTGSTMIKGSPGQTQIDVNMSTGDQSKFTFVLSGSEAAGDYDFITFTNSGKQNTKIGELQADSIVIKNNARMMENSKIQNSSALNLNLQIEATNQAQMNLIMDKSTGDMIKATGQGSILLEYNSMDGDIKLYGSYVLEKGSYNFSLQDIITRDFSIKEGSRVSFHGDPMATNLDISAIYSLSANLLDLDENFANDKELSRTTVPVQTILNVSGDVRRPDLNFDIAFPTLTQDVDRRVRSIISTNDMMNRQIIYLLALNRFYTPDFMNMGQSRNNELVSVASSTLSSQLGNILGQLSENWNISPNFRSEKGDFSDMEVELALSSQLLNNRLIFNGNFGYRDNTVNNNTFIGDFDLEYLLNKSGTIRLKAYNHYNDRNYYIKSALTTQGVGIMLRHDFNRWGDLFRKNPKNNGKTKDIQSDSIPRNTILPNDTISTKSSLSKEKIPQTDQMSITILGIESSCDDTSAAVIRDEVMLSNVIASQAVHEAYGGVVPELASRAHQQNIIPVVSEALKRAGVTPEDLSAVAFTRGPGLMGSLLVGTSFAKGFTTALNIPLVDVNHLQAHVMAHFIKRFPDDNTQPPFPFLCLLVSGGNSQIIKVESYNEMTVIGQTIDDAAGEAFDKCAKVMGLPYPGGPVVDRLAKEGNPKAFALSKPHIPGFDYSFSGLKTSFLYLLRDKIKEDPDFIEKNKCDLCASLQTTIVDILMDKLYKAVKQTGIKHVAVAGGVSANSAVRAAFEDYARKYGWTVYLPPFSFTTDNAAMVAITGYYKYLDKEFCDIAKAPFARVELMNVEIIVIGDELLIGQVTDTNSGWIARELNHIGWEVTEITTVRDRSREITDALNSSFGRVDVVLMTGGLGPTKDDITKQTLCDYFGGKLVFDESVFANVEAIFRRRKLTMNDSTRNQAYVPNVCTVIQNPVGTAPVMWFERNGKVLVSMPGVPTEMKTVMKEVVISRLREYFRDHSSILHRTCLVKDFTESRLSETLSDFEAQLPGCIKLAYLPTPGVIRLRLTARGDEESYLQKIIDDEFFKLRTILGSHLFCGSDTTLAGALGSILTERGETLATAESCTGGNIAHEITRIVGSSVYFKGSVVAYSNEVKIRVLNVSSETLSGFGAVSRETVLQMVSGVQRLLSSDCAIATSGIAGPGGGSVEKPVGTVWIAVRYGERSEAECFCFEGDREQVIARATQSALLMLIQLMTKMSKICQITGKKAMVGNNVSHSKRRTKRRFNVNLFTKKFYWVEQDCWITLTLSAAGLRTINKMGLDAAIKQAAGNGYLTEIKMLYMAKKAKGNRVQVILECTEHKASGMPGTSRYITTKNRKNTTERLELKKYNPILKRVTVHKEIKMAKKTVASLQKGEGRTYSKVIKMVKSPKTGAYTFQEEMVPNDAVKDVLSKMGLFDFFSKEKKETLDKGLSKTKEGVFSKLARIVAGKSQVDENILDDLEEVLITSDVGVETTLRIIDRIEKRVARDKYINTNELNSILREEITALLTENDVEDAGEFSVPEGKKPYVIMVVGVNGVGKTTTIGKLAYQYKKRGNSVYLGAADTFRAAAVEQLMIWGERVGVPVVKQKMGADPASVAFDTLSSAKANNADVVIIDTAGRLHNKLNLMNELTKIKKVMEKIVPGAPHEILLVLDGSTGQNAFEQAKQFTAATEVNELAITKLDGTAKGGVVIGISDHFKIPVKYIGLGEGMEDLQVFRRKEFVDSLFGDMIKNSVDIITLGCSKNLVDSERLMHRFAEAGYKVRHDPEKVSSEFVVVNTCGFIGDAKEESIEMILQMVEAKKAHKIHHLYVMGCLSQRYREELEAEIPEVDKFYGKFDWTDLLTDLGSRISEEKDFGRILTTPPHYAYVKIAEGCNRFCSYCAIPLITGRFVSYPMEQLLDEVKSLVSQGVKEFQIIAQDLSSYGLDLYGKLKLPELIDRMAQIPGVKWIRLHYAYPSQFPYEILPVIQRHDNVCKYLDIALQHISDHVLVDMRRHVTKQETYDLLKRIRTEVPGIHIRTTLMVGYPGETDEDFEELKAFVREARFERMGAFAYSEEEGTYAANHFPDSIPDKVKQARLDELMALQEEIALESNASKVGQIFDVIVDREEEDYYVGRTEYDSPEVDPEVLIAKDRFLTVGDFCRVKVVEALPFELMAVPVELDMAKEVDSIHLLSCAIEASLGNDFPAFAFRLPGEDGFYWGACEPDRLMTLADGVFPERQEGFFFAPFEEGELPRYFFPVKIQRAEEISLEALNYEAGQTLANLEIKPVDSSFEQYEKQVNTLVAAMSRKEIKKAVLSRTVTLNRPVVSDGQLFFRLAAKYDSAFVSWVNVPGVGQWIGATPETLLDCDGVSLTTMALAGTRKAGAKEPWGQKEQEEQQIVTDYISKVFRDKGLEPIIGERFSRKAGQVEHLCTPISLKVGSANGRLAEILSALHPTPAVGGYPKELAMEWIRRVESHERRYYGGYLGPMFGEHVRLFVNLRCMEVDDSRLRLYVGGGLTDKSDPESEWKETEAKAQTLLSIINGYKMKTTDKQGCNILVALLAEHGVKRVVLSPGSRNAPLLMAFSRTPDIQDYVVVDERTAAFMALGMSQRSGEPVALVCTSGTALLNYAPAVAEAYYQHIPLIVISADRPMEWIDQDDSQTLRQYGALSHFVKRSYNLRAELSLPMDGWYFNRCINDALLTSLSGEKGPVHINIAVSEPLTQEMDMPSVRERFVTRIPSSNIPDEQSMKLLCDEFMSARKVLILVAFSQPDEQLNQVLLRLAELPQVVVLTESIANVRGKNLIPTIDRVYSVIDKAEWEDYAPDLLITLGGSLVSRMIKAFLRQHKPKLHWRISQGNHVVDTMQSLTCHIDSQAASFLEVLSRSVFPIESDYSMLWHRKEVIATRLHDDYIAHVGWCDLKAFSLILPAIPPGTALQFSNGTTVRYAQLFKCEQVLRSDCNRGVSGIDGSTSTAAGAACVGEEMTVLITGDMSFSYDVNGLSSTYLSPRFKIIVMCNGGGGIFRFIKPTSDLPELETCFEIHRDISVEKYADLFGLRYFELNDEKSAAEVLSLFFAEKDRPAILAVHTPNVYNAEVLRGYFRRSRMEPIDWKTIKEYEDILFDYCDGIAKITINRPQVYNAFRPQTNCEMLDAMSICRERSDIGVIILTGAGDKAFCSGGDQKVKGIGGYIDENGVPRLNVLDLHKAIRSIPKPVIAMVNGYAIGGGHVLHVVCDLTIASENARFGQTGPKVGSFDGGFGSSYLARIVGQKKAREIWFLCRQYSAKEAEEMGLVNKVVPFDRLEEETIEWCRTILKRSPMAIRMIKRALNAELDGQRGLMEFAGDATLMYYLMEEAQEGKNAFLEKRDPDFQKFPKFPGMLKASYTPYILHFKVPSGTSRGVLTQKETYFLKVWDEHNPDCFGIGECALFKGLGADDRPDYEAMLQTVCRGIDRIDEIDLSTWSSIHFGVETALLDLQHGGRRMIYPSEFTAGKQAIEINGLIWMGDKRTMASRIDEKLVAGFSCIKLKIGAIDFDDECELLAAIRRRYRREDIELRVDANGAFSPYDALEHLQRLSAYDLHSIEQPIRAGQWEAMARLCEETPLPIALDEELIGITDSTEKLALLETISPQYIVLKPSLIGGFSGAEEWIEFARNCRVGWWITSALESNVGLNAIAQWTATLPINMPQGLGTGALYTNNIPSPLEQIGDELRYNPDKTWIFSMDSWKMEIRLNHRICRSREEILNASTPEVAAFLDEWFAPSDFVWGHTSGSTGTPKPVRLLKRDMEASARLTNDFFDITCRSVMLLCLSPDYIAGKMMIVRALLSGADLLVVTPSSLPLTTIDEPIDFAAMVPAQVVESLKSTMQKSRLSRITSLIIGGAPLSPGTEVELEKLPVDMYATYGMTETVSHVALRRIGDSLSLYCALGGISFSIDERNCLIIHAPHFSVKEFVTNDVVELVDSRNFRWIGRYDHVINTGGIKVFPELIEKKIAGLFTRRFFVASCDDLKWGESVALVIEGEALSLEQEKILLEKIRAKVNKYEFPRKVLYVQKFKETSSGKVIRNIMKFFQNLVWVAFFSLSGTVAAQTPVYLDETKPMEDRIEDALSRMTLEEKVALCHAQSKFSSPGVPRLGLPENWMTDGPHGIRAEVIWDEWDQAGWTNDSCMAFPALTCLAATWNPEMALLYGKSIGEEARYRNKNVLLGPGVNIYRTPLNGRNFEYMGEDPYLASEMVVPYIEGVQSNGVAACVKHYALNNQEYDRHAVNVEVSDRALYEIYLPAFKAAVQKGKAWAIMGAYNRYKNQYCCHNQYLLNDILRKEWGFDGVVVSDWGGVFNTMEAAYNGLDMEFGTWTDGLTNGKGDAYSNYYLAQPFLDLLKNGTIPESVVDGKVRNILRLMFRTTMNRNRPYGSFKTPAHASAARKIAEEGIVLLQNKNNVLPIRLSETKRILVVGENAIKMMTVGGGSSSLKARYEISPLDGLKARVGEATEVIYARGYVGNIDGSYNGVVSKVNLAESRSADELLNEAVNKAKSADYVVFVGGLNKNSHQDCEGGDRTSYGLPYGQDRVIEALSQANPRTIVVLISGNSVAMPWIDQVPAIVEGWYCGSEAGNALASILVGDVNPSGKLPFSMYAKLEDYHAHSFNDSIVYPGLNHQQIYKDDIFVGYRWSDLHKKIRPMFSFGHGLSYTTFEYGKAEIDKKVVQQGESLRVRIPVTNTGNRSGAEIVQLYVSDLKSSLPRPKKELKGFKKVDLQPGESQIVEFEIDESKLSYFDDKKHAWVAEPGKFEILIGASSSDIRSKVAFELEMVKKSTLESILQQEMSDFWALLENEEKRIIAENFKIQNFKKNEIIYSEGEDPAQLMCLLKGKVKIYKDGVGGRSQIIRLIRPVQYFGYRAYFSREPYVTAAAAIENSIVGFLPMPLVEEHIRKNNGLAWFFIKELSNDLGISDARTVNLTQKHIRGRLAESLLVLKENYGVEEDGLTLNIYMAREDLANLSNMTTSNAIRTLSSFTNEKIITVDGRRIQIIDEERLRKISKFGMEQNERIRCLIIGSGPAGYTAAIYASRANLSPVLYEGMQPGGQLTTTSDVENFPGYPEGISGFDMMEDLKKQAERFGANIRRGIATAVDFSQKPYRITIDGEKIIEADALIISTGASAKYLGLPDEVKYAGMGVSACATCDGFFYRKKIVAVVGGGDTACEEAEYLSHLASKVYLIVRKNFLRASNIMQRRVNENPNIEILFETQAEGLFGENGVEGVHLVKGKDTAHEERYDLPIDGFFLAIGHKPNTDIFKHSITLDENGYIVTAPHTTETNIEGVFAAGDVADPRYRQAITAAASGCKAAMDAERYLINNSLMKTNRILLCCSVLFLLLSMEPLHAQNGTQALDKVVGKFQQSNGISATFTLTVFNALNEPVEKQNGTIKLSGNKFYWNTTSMTVWYDGLQQWTYVKATEEVNLTEPTTEEIATVNPYILINNYKKDFYIKTLKSKSSKESIAELTPKKKGTNIDHIIIIINTTTWNPSSFKLYYSDRTYSIINLSKYATDQNFPDSTFVFNKKQYSKAELIDLRMPTTDLEENKIKQAQPEEGNDTAQNEREIRKNIFKNERVNFILGVILVIFSLYLTISFISFFFTGSIDQSKVENLSVGELSSIGNEIQNWTGAFGAYLSNLMINRWMGISAFIVSLWLYVVGRRFMKVAHTRMIRFTISCALSIIVLSLFFGFIFMHSYNNTFLYLGGYHGYYATLWLNAWIGPWGTALFIIALVIILLVHLSYKTIEYIRRVSSVNLTGKAIQAIKNRTDNPETDNENDNRETESNEIQNTENIPSSENDIVNTLPEYPDDPTEEIPTLEDIQENILPIEEETKRVTIETGDPDFVIETAETEVLATQAPMEDYDPTKDLSHYKRPTFDLLDKRENSEVEINMEEQSANKKLITETLKNYNIEISSITATVGPTVTLYEIKPAPGVRIARIKSLENDIALSLSALGIRIIAPIPGKGTVGIEVPNKDPKMVSMYSVLASKKFQECKYELPLALGKSITNEVCIADLCKMPHILVAGATGQGKSVGLNAIITSLLYKKHPAQLKFVLVDPKMVEFSIYSVIERHFMAKLPDAEKSVITDSDKVIATLNSLCIEMDNRYALLAKANVRTIKEYNEEFIHRKLNPNNGHKFMPYIVVIIDEFADLIMMAGRDVEMPIARIAQKARAVGIHMIIATQRPSTTVITGNIKANFPARIAFRVMQMVDSRTILDAPGANQLIGRGDMLFTEGGDLKRIQCAFIDTPEVKRICEYISKQQGYPEPYELPEYKNPDSDAGSNGNDVINRDPLFEEAAKMIVVSGQASTSSLQRRYSIGYNRAGRLMDQLEAAGIVGPSEGGKPRQVLIVDIMALENKLELMKMPKINFHVILKFIGILLCMESIFMLVPFVVALIYGEGDAPAFIKSASITAIVGGILFYIFRNSRNDVGKRESYLLVTSIWLFFSAFGMLPFCLMPNHLSITDAIFETVSGLTTTGASIIENVDVLPHGILFWRSFMHFIGGMGIILLTIAILPMLNHQGGLLLFNSEVTGITTEKLKPKIGETAKKLWSVYIILTIILCLLLWLGPMNLFDAICQAFCVMATGGFSTKQAGINFWNSSYTEYVMTIFTFIAGINFALVYRAVTGDFKKLLHNEETKWYTAIVLGATLLVITGLYITDQNGSFEDTFRRSLFLVVTIVTSTGYTGDDYVAWGPFFTTIFLLLMFFGACAGSTCGGAKIDRLVVLAKNTKNELYRVIHPNAILPVRVNGKAISHEIVSKILAFILVYVMVLIAGSIILSALGLSMEESFGSTLSCLSNIGPGAGSTGPAGNYAFIPDLGKWTLSIIMLIGRLELFTVLILFTSYFWKNSMKIIIAGAGEVGTHLAKLLSREEQDIILIDNDEEKLRELDANYNLMTVIGNPTAFQTLKQAQVYKADLFIAVMPFESRNIMACTMASKLGAKKTLARVDNYEYLLPENKAFFENLGVNELIYPEKLAAEEVITALKHTWTRNWFELCNGELIVLSVKLHDNAKILNKKLYELTTAESQFHIAAIKRIHETIIPRGNDEIKIGDIAYFTTTPNHIQEIQKLSGETEAEIHKIMIMGGSRIAIRISSYAPDNMAIKLIECDKQKSYKLAEYMNDIIIIQGDGRNVDLLKEEGIRDMDAFIALTDSSETNILACLTAKELGVKKTIAEVENIQFISTAERLNIGNIINKKLLAASRIFQLLLDEDSSNAKCLALSDAEVVELVAKENSKITKAAVKDLKLPSDLTIGGLVRNGHGMVVTGNTWIQPNDHVVIFCLDTALHKIEKLFNMNPDNTELLKQINTPADLRRLQVSELPQVCDEIRHFIINTLAHNPGHFGSSMGAVELTVALHYVFDTPYDRIVWDVGHQAYGHKILTERRDRFYTCRKLNGLSGFPNPAESEYDAFIAGHASNSISAALGMAIATQLKHEQKERKVIAVIGDASIAGGLAFEGLNNASISPNNLLIILNDNDMAIDHNVGGLNEYLVNITTSKSYNKLRYDAYRTLRKLNLIDDEHRGAILRFNNSLKALLTKQQNIFEGLNIRYFGPIDGHNVVNIVNKLNDIKDMTGPKILHLRTIKGKGYAPAEKEPTIWHAPGCFNPETGDRITVTEEQKPPKFQDVFGLTLVELAKKNDKITVITPAMPTGSSTCFMMEKFPERSFDVGISEEHAVTFAAGLAKEGLQPFCSIYSTFLQRGFDEVIHDVAIQNLPVTFCIDRAGLVGEDGVTHHGAFDMCYLRCIPNMTIAAPMDEHYLRHLMYTAQLSDRGPFAIRYPRGCGSHVDWECPMHEIPIGKGRKLYDGNEIAVLSIGTAGVAARQAVERARKTGVKAALYDMIFVKPIDEEILHEVAQKYKRIITVEDGCITGGFGSAVLEFMSDNGYTPHIKRIGIPDKFIAQGTVKELHQLCGIDEENIHSVIIGNWMRKYNTFRISCIALLWAFLCVLLIRGRGIDGQALFAIIASGIIVFVPLYKRWKQESKGKMKIVILGAGKMGSFFADVLSFDHEIALYDIDPYRLRFAFNTLRMTRPEEIQDFTPDLVINAATVKYTIEAFQTVLPYLPAHTILSDIASVKTGLPEFYAQARHPFVSTHPMFGPTFANLSDLSTQNTIIITEGDHMGKIFFKDIYQRLRLNIFEYSFKEHDETIAYSLSVPFTSTLVFASIMKHQEAPGTTFKKHMDIARGLLSEDDYLLTEILFNPNTPDQVRGIQKQLSSLLDIIERKDSIKMKEYLTQVRKNIEMEDLQSILLPGIDSKRPIIIAGPCSAETEEQVMTTAKSLAERGIKIFRAGIWKPRTKPGGFEGIGVEGLAWLKHVKEETGMYTATEVATERHVFEALKHGIDILWIGARTTANPFAVQEIANALKGVDIPVLIKNPVNPDLELWIGAVERIYNAGLHRLAVIHRGFSSYDKQLYRNMPQWHIPIELRRRLPNLPIFCDPSHIGGKRELVAPLSQQAMDLGFDGLIVESHCDPDCAWSDKNQQVTPDALDYILNMLVIRETTQTTENLSELRHQIDNLDNQLLELLAKRMRISREIGQYKKEHSMPVLQTNRYDEILQKRMAQAVELGMSGEFMKEVMQAIHEESVHQQMDIINKMQNSINPFNIRPANRVNNISEYYFSKKLKEIAELNARGLDIISLGIGGPDRPPHPETIETLCTESRKSDVHGYQPYIGLPELRRAFADWYNRWYNVTLDPQKEIQPLIGSKEGILHISLAFLNAGDGVLVPNPGYPTYSSVSRLAEAEIFTYDLDENNHWQPDFKQLESLPLDRIKLMWVNYPNMPTGAKASMELFTKLVDFGKRHNIIIVNDNPYSFILNDNPMSILAVPGSKDICIEMNSLSKSHNMSGWRIGMLASNPQFIEWILKVKSNIDSGMFRPLQMAATKALSCSQEWYDQLNEVYRNRRDIAEKIMKALGCSYDPSQAGLFVWGKIPDSATDAESLADEILYNAHVFITPGFIFGSRGNRYIRISLCAPEKKMQEALHRIEKIKSNKMNKKVTIQGIAGCYHEAAARSYFGEEEIETVPCSTFPEMFDRMNNDRSLLGIIAIENTIAGSILQNHELLRKSELSIIGEYKLRISHVLAALPGETMDDLLEVNSHPMALMQCGDFLQAHPKMKVVEKDDTAGSAQEISHRHLSGHAAICGKLAAEIYNMNILAEGIETNKRNFTRFLILADPSHREILIAGKRINKASLVFSLPHTQGSLSKVLTILSFYDINLSKIQSMPIIGKEWEYRFYIDLTFDNFTRYKQSLEAIRPLTKDFKILGEYAEFNQPLMQNFLLFVTYKASFKYHIQNDAIKKISFYSKIYNYLFGFKNDFITFATSNSYLTGNEEFMETSELTLFSAMCESFCTAVEKARAEAMSLTDMYVQVKYDEQLFSVFDDTESILVQSVIDGLDEWRDSSGERSDAAIIAFLRKVLSHEDVNHALHSLDIIPPFSVVLVDNEMEPVADLITLDDENIYLHDDFWEKMDKELDDFFEQLMSDTKMNVSHQNTDNLNAVISIEISKADYQEKVDKSLRAYGQKANIPGFRKGKVPFSMLMKMFGKSVRVEEINRLVSESLYNYIRDNKLNILGEPMTAEDMTVDLDTQDDFTFRFDVALAPELNVKVDKKIKVPYYTITVDDDMVKRQNESFLSRFGKQISVDESTDERDLIKGSMVEMVKKGTPVEGGITVESTIVSPAYFKNDKEKAKFAGVKKGDKVMFNPSKSCDASVAELASMLNIDKEKAANVTSNFEMTVTDITHLQPAELNQELFDNVFGKDVVKTEEEYFAKLREMIAHQLVPESDYKFSIDARAAIEKAVGEFDLPDAFLKRWLLATDKNRKAENIDEDFAKMVPDLKWQLIKEQIVKQFDIHVDDADLLALAKRVAASQFAQYGMTGVPDDVLERYAREMLSSKESRSRLIDQATEQKIQTAIKESVTLTDKEVTMDKFQKMFEVAEMTNDFRKYAVKHLGMNGLALDQYAQFTSSYLSPSIMEERQLNVTQMDVFSRLMMDRIIFLGTPIDDYTSNVIEAQLLYLDSADPGKDISIYFNTPGGSVYAGLGIYDTMQFISSDISTICTGMAASMGAVLLVAGTKGKRFALKHSRVMIHQPMGGAQGQASDIEITAREIQKLKKELYTIIADHSGNSYERVEKDSDRDYWMTALEAKEYGMIDDVLVKSMKMAKGEKCSFCGRGENEVRLLMPGRDGCICDECAEQAYLLSEEYLHKKKKASSKWTVSREDLPKPEEIKTFLDQYVIGQDDAKRYLSVSVYNHYKRVLQVADNDDVEIEKSNIIMVGPTGTGKTLLAKTIARLLKVPFTIVDATVLTEAGYVGEDIESILTRLLQVADYDVEAAERGIVFIDEIDKIARKSDNPSITRDVSGEGVQQGLLKLLEGSIVNVPPQGGRKHPEQKMIPVNTKNILYICGGAFDGIERKIAMRLNTHVVGYNGGGSNGRIDRENLLQYIAPQDLKSFGLIPEIIGRLPILTYLQPLDKAALRRILVEPKNSIIKQYIKLFEMDGVKLSFDEDMLDYVVEKAVEFKLGARGLRSIVETIMMDAMYETPSSTKKKLHITRSYAEKKLEKAKLLAVMAKEVNLTEELKRNFGFDTFKGNQEAIIRNLLAGNDTFVLMPTGGGKSLCYQLPSLILDGTAIVISPLIALMKNQVDAMRNFSAEDGVAHFINSSLNKTAIDQVKTDILSGKTKLLYVAPESLTKEENIDFLKQVNVSFYAVDEAHCISEWGHDFRPEYRRIRPIINEIGVRPVIALTATATPKVQHDIQKNLGMLEATVFKSSFNRPNLYYEVRPKTANIDKDIIKYIKSQEGKSGIIYCLSRKKVEELAELLQVNGIRALPYHAGMDSATRTQNQDAFLLEKIDVIVATIAFGMGIDKPDVRYVIHYDIPKSLEGYYQETGRAGRDGGEGQCITFYINKDLQKLEKFMQGKPIAEQEIGKQLLLETAAYAESSLCRRKILLHYFGEEYEEDNCGNCDNCLNPKKQVEAKDQLCAVLETIIALKEKFKAEYVIDVLLGKETSQILSYQHEDLEVFGSGQGEDERTWNAVIRQALIAGYIGKDIENYGLLKVTKAGHAFLKNPVSFKIVKDVDFDEVEEEVPMKGGASCAVDPELYSILKDLRKKIAKRLELPPYVIFQDPSLEAMATTYPITIEELQNIPGVGAGKAKRYGEEFVKVIKAHVEENEIERPEDLRVRTVANKSKLKVSIIQAIDRKIALDELAESKGLEFGELLDEIEAIVYSGTKINIDYFLHEIMDDEHIDDIFDYFKESESDSLEDAIEEFGMEYSEEEIRLIRIKFLSEMGNMSFVAEKVVMDGLTFDDVLLIPAYSEVLPRNVELSTQFSRNIRLNIPLVSAAMDTVTEAQLAIAIAREGGIGVIHKNMSIEAQARQVHAVKRAENGMIYDPVTIKCGSTVREALSMMSEYHIGGIPVVDDKNLLVGIVTNRDLRFERDLERLVDEVMTKDNLVTTSQSTDLQQAADILQRHKIEKLPVVDKDGHLVGLVTYKDITKAKDKPFACKDKLGRLRVAAGVGVTADSMTRVDALVEAGVDAIVIDTAHGHSKGVIGVLKDIKAKYPDIDVVVGNIATGEAAKFLVEAGADGVKVGIGPGSICTTRVIAGVGVPQLSAVYDVAKALKGTGVPLIADGGIRYSGDIVKALAAGAYSVMLGGMLAGVEESPGETIIFNGRKYKSYRGMGSLEAMEKGSKDRYFQANETDTKKLVPEGIAARVPFKGSLYEVVYQMVGGLRAGMGYCGAKDIEALHDAKFTRITNAGVAESHPHDVSITSEAPNYSRGMKNKWLLAALLAGNSWFGGGATDVDPVIMRVNNKDIHKSEFEYIYNKNSQQQIDHKSLDEYVTLFKNYKLKVAEAEAMGIDTTSAFKNELAGYREELAKPYLIDASVDDRLAHEAYDRMKEDVEVSHILIGLNARTPEDRAEAKKKAESVLAEIKAGEDFGMLAEKFSEDGSRQNKGYLGFIRGGRTVYPFEKAAFALQAGEVSDIVETQFGYHIIKVHSRRPNPGEFLFSHIMILVPRGASDEVKAQKESEIRAIYEELKSGADFATMAKERSEDKASAVRGGELPWVSSGQFVKEFEDAAFALKNKGDITEPVLSPYGWHIIKLMDRRDIKPFEQMRSEITRMMARDERGSMARNAMVAKLKNDYGFSLEESQRAKLMKLAGDLGKVDSSYIAAIHNDQSVLFSFENHSYTVADFASFLSKGRDVTVNAPDYISTMIGYMADMEILDFEKAHLEDKYPDFRNLMNEYRDGMLLFEISNREVWEKASKDTEGLQKFFKKNRKKYKWDKPHYKGFLIQCCDAATADGIKNRIKELDDDSVIVVLNREFNTDSLTRVKVERGLFVEGDNEKIDELVFKGAPVKADEKLPIAFVFGKLLKKMPEAYTDVRGQVTADYQTYLEKVWVKKLNKKYPVEIYEDVLKTVNRPMYKVSIIVLCAAFSACLFSACRSGLQSDENSLVQVGDEILSRQELADAMPEGLSLADSTDFADKYIRRWICDVLLYRMAQKNIPDIERIDALVEKYRRDLVIFEYRKRLVNERVTKSFDEQEMLDYYERNSEMFRLHEAILKGLFLKVPENTPNLGQLKKWYCSTNPDGVEKIEKYALKNAVIYDYFYDKWIPFEEIVNNIPYEFGDAESFLKTHHKLEFNKNGYWYLLNITEYRLPGEEMPYDFARAQIQEILTNSNRLNFDRELEENLYRDAEKSGDIKWLYKGEKSIEKESIKMCKVTDWLLFFFMAVSLPAFSDDNVIDEVVWIIGDEAIYKSEVEEQYRQMQYDGQRIDGDPYCVIPEQLAVQKLFLHQAKLDTITVPDATVFQQVEARINYLIANIGSKEKMEEYFKKPVTEIREELANVIRDQGTVQEVQRNLVKDVKTTPAEVRKFYNQLPADSIPYIPMQVEVQIITLNPKVPQQEIDNVKARLRDFSEQVNKGERDFSTLAVLYSEDRGSAMMGGEMGFVSKSNLVPEFANVAFNLNDPKKVSKIVETEYGYHIIQLIEKRGDRINVRHILLRPHVSEKDISDALVRLDSLRVDLIDKKISFDEITQYVSQDKDTRNNKGLMVNPQTGNSKFEMGQLPQDVAKVVADLKVGEISKPFVMTDERKNKEVVAIVKLKNRIDGHKANMSDDYQTLKAIVEEKKKTDILNEWLAKKQSETYIRIKEGWRNCEFKYDGWIKKMGHQKRIKDEKGRHKILVGILCLLTLGMWAASGTPEKKLPKQDDPDKVYLVNSDELTFDKEQSADYRVLRGNVVFRKDSMYMYCDSAYFYEKDNSLDAFSNVRMEQGDTLFIYGDVLYYRGDEQIARLRNNVRMENRDVTLFTDSLNYEMIPNIGYYFDGGKLVDSQNELTSVYGQYSPDTKQSVFNFDVQLVNEKYTLYSDTLEYNTQTKIADIVGPSTIVSDSNIIYSSAGWYNTETDKSMLLDRSLVTSKGQSLTGDTIFYDRRSGFGEVFGNMVLNDSIRSLIMEGQYGFYNERTEYSFATDSARLLEFSRGDTLYLHADTLKSHLVLPDSTRLLQAYHGVRFFRIDAQGVCDSMEFTSVDSLLHMYKLPIIWNENYQITGDTIRIHMNDSTVDWALIPGSAFAAQHKDSVFYDQVSGKELKAWFEQGQLRQIDVNGNAQTIFYPQERDSTLTGLNKAESGFLRMYLKNQQMEKIIIWPQPQGSMTPLDLIKPEQLYLPAYKWYSDLRPVSPEDIFRKPEVKIEVVEEKKHRFNHMSDIIHLLPDSVANQIAAGEVIQRPASVIKELVENAVDAGATSIQIILKDAGRTLIQVIDDGKGMSPTDARLAFERHSTSKIRSADDLFSLRTMGFRGEALASIAAISQVELRTRRVDDEVGTCIRMSASQCEGQEAISTPVGSNFAVKNIFFNVPARRKFLKSNQVELSNILNEFERMALINTQISFILVHNDSELYNLPATNLRQRIVALFGKSLNQQLLSLGTETSLVKISGYVGRPEAARKRGALQYFFVNGRYMRHPYFHKAVTICYEHLIPVGEMPNYFINLTVDPETIDVNIHPTKTEIKFENEQPIWQILSASVKEALGKFSTAPSIDFDMEDAPEIPTSKPGTHVLPPTVHVDTTYNPFRAGGGGSSVKRPNYDWQQLYSSFNNTKEGSTVQPDSDNDFPSKLDFSDGYVSNFSSEGEQSVFPEFESKLNQSGRTVLQLKGKYIMTSSAEGLMVIDQHRAHGIILFERFMVGISSREMASQRVLFPEIMQLTVSQSETLHGIWEELIALGFDLADMGQNSYSINAIPAGIEGIDVRDLIGQMLVTASEKEHDAKASLQKRMAWTLAEAAAVPVGQSLSQEEMLSMVDDLLSLKTPAYTPDGKSVFIIVSYDELQKQFNMLILLSPAKTMVGSSRTTVPFVTVPLYKNEAEHIAMEMAGYSVEELSGMLGINRNLALQTKERYNVFHSPDVYGLPALLAYTGIVFRYISPADFTEADFEYAQNHLRMASACYGLTRPLDVIKPYRMEYAVELPSMGIPVSEYWKPLLTDKLIDDTKEAGGILVNLASREIQQSFDWSRINKRVRVITPEFKVYKGDGFKTIVIYAKMMRGAMTRYILKNKISHPDDICSFSAEGFHFSPEHSSENNPVFVVMHIVYFSPTGGTRKAAYIIGKEIDPQATEIDITDHTRQQNSYELNGEDTLLVAVPVYGGRVPSVAIDRLKRITGHNTPAILVVVYGNRDYDDALLELKTTMESNGFQTVACIACIAEHSIMRVYAKGRPDSDDETILKNFSEQIKTKLVQLKNGESFTEIQVKGNADYKIYNGVPLKPRAGKKCTQCGKCAALCPTNAIPQENPRMTDESKCISCMRCIAVCPQNARKINPLKLFLSIRAFKEKCETRKEPELFIMSKVSKEDALKYHSEGKAGKIEVIPTKPYSTQRDLSLAYTPGVAEPCLEIEQDAEKAYEYTAKGNLVAVISNGTAVLGLGDIGALAGKPVMEGKGLLFKIFAGIDVFDIEVNEKDPDKFIAAVKAISPTFGGINLEDIKAPECFEIETRLKEELNIPVMHDDQHGTAIISGAGLLNALDIQGKKIEEAKLVVNGAGAAASSCTKLYMGLGIKKENIVMVDSKGVISTSRTDLSPAKKQFATERTDIKTLADAMRGADIFLGLSVADVLTTEMVQSMNEKPIVFALANPNPEISYDKAMASRKDLIFATGRSDYPNQINNVLGFPYIFRGALDVRATAINEEMKLAATYAIAKLTKEPVPDVVNSAYGIKRLSFGPEYIIPKALDPRLLTAVAPAVAKAAMDSGVAQHHITDWDAYNDRLKKLMGYDNKMLREFTEMARKEPKRVVFAEANHANMLQAASTAMKEGICKPILLGNDELIGKLAESIGVDLSGMQIINLRHPNEEDRRIRYAQLLTEKRQREGMTYAEAHEKMFDRNYFGMMMVEAGEADAFITGTYSKYAETIQIAKEVIGIREGYKHFGAMHIMNTKCGTYFLADTLINRKPTTETLIDIAKLSYDSVRFFAKDPVIAMVSYSNFGSDNQGSPLRVHEAIKILHEQYPEIIIDGEMQMNFALNNKLRDKSYPFNKLKGREVNTIVFPNLSSANSAYKMMLEMGVAESIGPIQMGLNKPIHFTDIASSTRDIVNLTTVAVLDAIVQERRNKQMTIHITDIPNESFNHYKHVLHVDNEFALIEINKDNISDLSKFNYPYKAEAFTLCIVLKGWVKGKINSIEYNAIAPCVISIYPNQILQHDSNSEDFYIICIAFTKNFASNIASYSKNEILLLRFPRQDNISHHLSQETLTALLDYCAYIKKIIADTDNPFRIKSIQHLTVALFYSTVWKQISSYKKNEKTRADYITYEFLDLVEKNFKKYRQLNFYADKLCITAKYLSTTVKNNSGISASEWIKRYVILEAQRLLKNSSMTIQQISNELNFPSQTFFSKYFKHQIGLSPKEYRKSMKLTKNFIQPIAGAMLCIFLFSCGGKNAQNGGGMVREYAVMTLQPDSMEWYSNYPAAIKGKRDIEIRPNVSGFITDLRVDEGSVVRKGQVLFVIDTVPYKAALKVAETNVEVAKASTETARLTAENKRELQRRDIISEYDLQMAENSYASAKAQLAQAEAQLVNARNNDSYTRVISPLDGVVGEIPFRVGSLVSPSSATPLTTVSDNSEMYVYFSMTERQILELVAQYGAENFLQKLPTVSLKLSDGSIYPLKGRIETVSGIIDTQTGSSNMRATFENPNRLLRSGGSGVIMIPMKNDHAILVPQKATYEIQDKKFVYVLNDDSTVTSTEITIASIDNGKEYMVTSGLKAGDRIVTEGVNTLKDGMTIKAAGSQNNQMKLDRFINRPVLSTVISIFMVILGVIGLVFLPITQYPDIAPPTIQVSTTYTGANAQTILNSVIAPLEESINGVENMLYMTSTATNTGSASINVYFKQGTDPDMAAVNVQNRVAKAQNLLPAEVTRVGVITEKRQTSMLMVFSLFSPDDRYSLEFLENYAKINVLPLIQRVSGVGAADVMATDYSMRIWLKPDVMAQYGLMPADIAGILAEQNIEAAPGQFGDQGNQSFQYVLTYKGRLQTPEEFGNMVIRANDDGQILYLKDVADIELGRLTYGFKNFQNGHNAVSAMVYQAAGSNATAIIGDITNLLEDIKKDLPPGMEIETTLNANDFLFASIHEVIKTLIEAFILVFFVVYVFLQDFRSTLIPAIAIPVSLIGTFFALYLMGFSLNLLTLCALVLAIAIVVDDAIVVVEGVHAKLDQGYKSPRKASIDAMRELSGAIISITLVMMSVFIPVSFMPGTSGTFYRQFGLTMAFAIGFSAINALTLSPALCAILLKPHNKDGHENKKTSFIDRFHIAFNAAYNTMLSKYKNGVTHFVHHKKLSFAGVIVGVIVLVILMNITPTGLVPNEDTGTIMITADLQPGTSQERTEKILMEVDSIIATHPAVKSRTQILGFSFIGGQGNTYGSFIVKLKDWDERTGKGMDANSVIGTLYMKFATEIKDARVLCFAPPMIPGYSISNGFELNLQDKTGGSLDHFYEVAQNFLAELMKRPEIAMASTTFNPSFPQYMVDVDVAKCKQAGISPSDVLAALQGYLGGMYSSNFNRFGKLYRVMIQAEPSARANPESLNNIKIRNGSEMAPITNFITLKKVYGPDNIKRFNMFTAMTINGNPADGYSSGEAIKAIEEVAAETLPVGYGYEFSGMTREEQGSSSGTTAIIFMLCLVFVYLLLSAQYESYILPLSVILSIPFGLAGSFIFALMMGVENNIYLQIALIMLIGLLAKNAILIVEFALDRRRTGMPIINAAIDGAAARLRPILMTSLAMVIGLLPMMFASGVGANGNGTLGAGAVGGMLIGMICQIFIVPALFVVFQIIQEKIKPLKWNDLDNSEVISEIEQYSKMKRILLYTVCGLAMLTMFNSCHIYNKYHRPDVDVEGLFRDTVAAGDTLAADSLNMGNLPWEEVFTDTILQNLIRIGLEKNSDLQSAMLQVEAAQASFNAARLAFLPTLNLTPQGGVSSFDGSKASWTYNAPVTASWEIDIFGRVLNSKRNAKAVLMQSEAYEQAVRTQIIATIANGYYTLLMLDKQLAVTEETALLWEKSVETIKAMKIGGMTNEAAVAQSEANSYMIAASIPALRQQIREAENSLSTLLYQAPQSIERGTFEDQKLPEMLQVGVPVQLLSNRPDVRSAELSLAAAYYTTNIARSAFYPNLVISGSAGWTNSAGSMIVNPGKVLLSAAASLVQPIFNHGSNVANLKAAKAQQKMAAINFQQTILNAGKEVSNALYQIQTTKETLVNRNRQVASLERAVEATESLMKLGTSTYLEVLTAQQSLLNAQLSQISDSYQCMVAVVSLYHALGGGREIEENTKMISPLAYVDSKAVIGNNVTIHPFAYIDKDVVIGDNCVIYPYASVLAGTVMGKNNRVFQGAILGAEPQDFHYKGDATRLSIGDDNMIREYVIINRATTPEGETVIGNRICLLKGTRIGHDCRVDDDCILGIDCDLSGECHIHSKAILAGRVIVKERCRVGSWTLVKSGCRTGKDIPPYILAAHNPITYKGINAFILRRRGFSEATIENIALAYRQIYQSGTSLENAVLRIKEVVEPSPEIDYILSFIEDSKMGIIATYGEEKMNTELQQRIIKQATRMFLCNGIKSVTMDMIASQLGISKRTLYENFKEKNELLLACLESQEMERRARLEVYFANRKNVIDLLLNVYEDILRFMRNTSPMFFVDMERYYPRVNDKYENDKECHKQATVDLLKEGVGEGVIRADINMEIVATLLTFQFELLKKSDQIFNSKYTFTEIFETIFKSFIRGIATPEGVKYTDEFFEENRMTIMHRVGAMLMLFLFPGISWAQEQKVQSVTLDLKTAIGIALNENPTIKVADVEIEKKDYSKKETIAGLFPRIDGSASYSRTIEKQTMYMDSEAFDMSAMFTPIYNTISQLHPEFQVPQTGGASSSSGETGMKVGTDNTYSVGFSASLPIIAPQLWKSVQLSSADVEQAVEAARSSRLSLVNQVEKAYYSLLLAQNSYEVIKMSYDNAKLNARDYKNKFEQGTASEYDVLRAEVQVRNLEPTLLQTENSVKLSKLQLKVLMGMDMTVDIEVTDKLDDYEASMYEETLNINTSLEQNTDLRKLDLQTAYLKKAVDVQRMAWFPTLSATANYNWISMSYGGMFDDFRWNPYSTVGLSLSLPIFQGGARHFKIKQAKSNVLQLGLQRDNLVNSLSMQVQMSMDNIQKSIKQIASNKEGVRQAEKAYSIMQKSFEIGSATFVELNDADLALTNSRLSYNQAIYDFLAAKSDLQLLLGNTDLEQYKQEKSQDKMKRNHFFNVMAVCAALSFVACSGQKETSEQVEEETVQLVKIAKVMEQAVPQVVSYTATVEPYKRNSISSSVPNRIKKIYVEVGDKVYAGQKLVDLDQANLAQQKLQLDNLELEYNRVKELFAVGGASQQQVDQLRTQYETTKTAYGNLDENTVLVSPVNGVVTARNFDNGDMASGAILTVMQIQPVKVLVNVSESDFTKVKIGMSVDVNVEVYGDEVFKGKVSLIHPTIDPATRTFVTEINIPNTDSRIRPGMFARVNIDFGNVNRVVVPDQAVVKRSGSGDRFVYVYKDGKVSFNQVQLGRHIDKTYELISGVENGAEVVIAGQSRLKDGASVKIAEMSLYEGSVKKPIMTSLCFVAVAILGIFSLTKLPIDLYPDIETNTIMVMTAYPGASAADIENNLTRPLENALNAVSDLKHITSESKENISLITLEFEFGEDIDVLTNDVRDKLDMVKSELPDEAENPIIFKFSSDMIPIVLLSVQANESMPALYKILDDNVASPLARISGVGSVSISGAPEREIQVYVDPVKLEAYNLSIEAISSVIGAENRNIPGGTFDVGSETYSLRVQGEFSDATQMNDIVVGNFGGKTIYLRDVAVVHDSVEERAQETYNNGVQGAMIIVQKQSGANSVEISDAVMEALPRLQKNLPSDVKLGVIVDTSDNIRNTIDTLFETVILALLFVSIVVFLFLGRWRATVIIVITIPISLVASFIYLAATGNSLNIISLSSLSIAIGMVVDDAIVVLENVTNHIERGSEPMQAAVHGTNEVGLSVVASTLTLIAVFFPLTLVTGMTGVLFQQLGWMVTIIMVISIVCALALTPMLCSRMLKLQPKQSKAFKILYGPIERGLDSFDNAYARLLHWAVGHRTIVIVSCMSFFVLSLFLVRFVGTEFMPTQDNGRIGVIVELPIGTRTEISKEIGMRLYNQWMEQYPEIEVCNFTAGQASTDNTYASMTDNGSHILTFNISLSDPGERKRTLSEICDLMRKDLAGYPEIKKSQVNLGGGMSAMGGETMLDYEIYGYSFEETDSVAAQLSALLRDIKGVSEVRISRADYQPEYQVDFDREKLALNGLNLATAATYLRNRINGATASQFREEGEEYDIKVMYAPEYRTSIEDIENIVVYNAQGKGVRVKELGTVVERFAPPTIDRKDRERINTVSAILSGAAMSEVVAAAQEKIDQMSLPSGISIQLSGTYEDQQDSFGDLFTLMYLIVILVFIVMAAQFESLTYPFIIMFSLPFAFSGVFLALWLSGNTLNVMSLIGAIMLIGIVVKNGIVLIDYISLNRERGMGIREAVVTGGHSRLRPVIMTTLTTILGMVPMAIGTGQGSEMWRPMGTAVIGGLTVSTILTLILIPVLYCVFASVGVKRKRKKHHERLLQDVKINSNNMKSVLITFDQAHYVRIIELLDKLSCRGFSYFEQMRGRGSKTGEPHYGSHAWPSMCSAIITVVEDSKVEPLLEKLHQMDEATPQLGLRAFVWNIEQAIMKHSSIWSCLMIFSVVGISLLTSCGRSGKVEITPYILNLHLKYTHIDNFEHGIARVSMDTKTESGRETAVYGCIDERGKEVIPCIYELVFVEPGGIVALSKEGVYKLFVYRDGGVEEFSLPSGIQPISGFCCDRSAVCDEYYNYGYIDSEGNLVVPCRYERVNDYNEGLAVVEQNWRKGYVDTDGYEVSPVSYRGAEMFRNGRGCVQNEAGLYGYVDETGREVIPCRFEKAISFYGEVTPACLNGLYGLIDKDGEFISTPRYEAMGICDVDVFYFYENGLYGFVDAEQKELTSARYDRIGELFSEGLIDVEQQGKHGFINKQGEEVIPCIYSRVSRFENGFARVARNGRVGYIDTAGREVFLLPSNSYASTYRSGYGVFCFKSGGEIFIFDEEGNRLDSNGRETPGTISAGSETPASGNVGSDVVSIPAVSAPVSSGSNRSDPARRVEWEIRRSRAIEELTRLQMKLIEDPNSAAIKHNIQSQQNIINTCNEMIAIYQMKILLDVHTHTVASGHAFSTLQEMVRTAADKGLQILGITEHTGGIPGTCSPIYFRNLPVVPRLMYGVELLLGAEINIVDYEGSLDLEEEYFKFLDIRIAGLHSLCYRPGTVEQNTLAVEGAIRNGHIDIISHPGDGTADLFFEPLVLAAKENGVLLEINNSSLNPYRHKEKARENNLEILRLCKHYEQPVILGSDAHISFSIADYRWLYPLLVETEFPEELILNDKPDVFKARLRRNREEMVVMETINIGYGHMALGFLLLIIPTYFLYRYRTGLVKDTLIAALRMTVQLFLIGFYLEYLFLWDKLWINLLWILLMIIIASSTALKRTHLPVRTLFMAVSVAFLVSLLVIDFYFLGLVVRPEKIFTARYFIPISGMILGNMLSANVIALNSFYGSLNRERQLYLYLLGNGASPSEALTPFMREALIKSFNPTIASMAVMGLIALPGTMTGQILGGSSPSVAIKYQIMLMITIFASSLISVLLTLWISRKKTFDKYGMTKFMIEFNNITFIYDNKPLMQHFSCCISSGEKVVLYGPSGHGKSTLLASVAGFVLPDEGSIRINGKILDSVAIQQIRRITAWLPQEFTLPFETVEELIAAPFRLKINQPSRPTKETVLNHFARLGLEPELYEKRSIEISGGQRQRIMLMITALLNKKIVLLDEPTSALDPDSISLIIDYIHAMRETTVVMVSHDTRFIEAFDRKIYIGDMNKLNCMMMAGTLLVTACQPTGKTGDVIGKQPVKVENGIMTTEVLMAFGRVSGPVVSPDKSKILYGVSYENLEQNKSNRELFVMDIDGQNKKQITCTPESEGNAVWIDGGKQIAYLSGKSGDSQLWIMNADGSNARQISYHEKGVHGFLFSPDEKHILFIGNVKYSEKASDLYPDLDKATGRVIDDLMYKHWDEWVEEIPHPYIASFDGKQLTDITDIMEGEPYESPMKPFGGIESFAWTPDSKAVAYTSRKKTGMEYSLSTNSDIYLYDLSTQETKNLTEGMMGYDTTPAFSPDGKYLAWGSMEREGYESDKNRLFIMNMETGEKQDLTSDFDYSTDELAWSPDGKSLYIRSAYQGEIHIFKVGLDKKIEQITTGYYDYASLAPVNDNCLIAMRHSLSQPDEIYSIDPQSKEVKEISFENKDILDQITMGKVEERWIKTTDNKKMLTWIVYPPHFDPSKKYPAILYCQGGPQQPVSQFWSYRWNLQLMAANGYIVIAPNRRGLYGFGQEWLEQISGDYGGQNMKDYFSATDEMKKEPFIDGDHMGAVGASYGGFSVYWLAGHHQKRFKAFIAHAGIYNLEQQYVETEEMWFANWDMGGAPWDKKNATAQRTFATSPHKFVDQWDTPILITHGEYDFRILASQGMSAFNAAKLRGVPAEMLIFPDENHWILKPQNGVLWQRIFFRWLDRWLKPQATTTDQQKMKEYRLQDWLPTTRKEMDLRGWDYVDVILFSGDAYVDHPSFGAAVIGRTLEAEGLRVAIVPQPNWQDDLRDFKKLGIPRLFFGISAGAMDSMVNHYTANKRLRSDDAYTPNGRHGMRPDYPTIVYSRILKQLFPDTPIIVGGIEASMRRLTHYDYWQDKLLPGILADCPADLLIYGMGERPIVEIARRLQQGENIKQLDDIPQTASMQPLSNMPCITEDEGNIVLASHEECLLHKRKQSENFKHIEEESNKYHAKRLWQSVGERAIMVNPPYPPMTETEIDASFDLPYTRMPHPKYRGKTIPAYEMIKFSVNLHRGCFGGCAFCTISAHQGKFIASRSKESILKEVKQIIDMPDFKGYLSDLGGPSANMYRMHGANEELCRKCKRPSCLAPQICPNLNADHSSLLDIYQAVDALPGIKKSFIGSGVRYDLLLHRHKDNELNHCTRFYTEELISRHVSGRLKVAPEHTSDRVLNIMRKPSFSLFEEFKRIFERINKEKGLNQQIIPYFISSHPGCTEEDMAELAALTKQMNFKLEQVQDFTPTPMTLSTEIYYTGIHPYTGEKVFTARKPEEKLNQRKYFFWYLPEKRNDIQNSLKRMHRNDLAEKLYGNTPWRKPARIVGETKSRQKKKKPNNKMKSDTEIADSTVLEGIDTIARKAGIPAENLFHYGPYIAKVPLKLINDHKAKKSHLILVTAITATKAGVGKTTVSIGLGMGLNHIGKKAIIALREPSLGPCFGIKGGATGGGYAQVLPPERINLHFTGDFHAITSAHNLIAAQLDNYIFQNRAEGSGLKNILWRRVMDMNDRSLRQIVTGLGGLNNGIPTEAGFDITPASEIMAILCLSKDMEDMEQRIGRIVVAHRYNGEPFTVNDLGITGPVLALLRDAIEPNLVQTTEHNPVLVHGGPFANIAHGCNSAIATRMALTFGDYVVTEAGFGADLGAEKFFNIKCRQSGLRPDLTVLVATTLSLKMHGGVPEADITKPNREGIIQGFANLDKHIENLQSFGQTVLVALNRFTSDTDEEIELIMHHCEQKGIRCVVNNAYTDGGIGAADLANAVVEEIENNPSRPLRFTYDDNDSPAVKIEKIAHIIYGAGEVVFSQKAEKKLKQIKNWNLNHLPVCIAKTQYSFSADPKRYGLVKDFQFTINDIELNAGAGFIVAIAGEMLRMPGLPKHPQAHQIKVVNGKIEGLYMDFKLISPYRPTGDQPEAIDELSRGILDGTPYQTLLGVTGSGKTFTMANVIERVQKPTLILSHNKTLAAQLYNEFKSFFPENAVEYFVSYYDYYQPEAYIPSTDTYIEKDLAINEEIDRLRLSTTSALLSGRKDVIVVSSVSCLYGIGNPEDFHSNVIDIKVGDNIGRNRLLRHFVDSLYSRNEIELNRGNFRVKGDTVDIYLAYDDVIVRIEFWGEEIESIRTIDPATGNSTGTFDAYKIFPANLFVTTKERIDKAIGEIEIDLGKQVEFFKSIGKNLEAKRLYERVTYDVEMIREIGHCSGIENYSRYFDGREAGTRPFCLLDYFPKDFLTIIDESHVTVPQIRAMYGGDRSRKMNLVEYGFRLPAAVDNRPLKFDEFEGLARQIIYVSATPADYELEKSEGIVVEQVIRPTGLLDPIIEVRPSLNQIDDLLEEIQLRIERDERVLVTTLTKRMAEELNAYLAKLDINCNYIHSDVDTLDRIKILDDLRAGVYDVLIGVNLLREGLDLPEVSLVAILDADKEGFLRSHRSLTQTVGRAARNLNGRVIMYADRITESMQKTIDETNRRREKQLAYNEENHITPQAIQKSKSSVLVSNADTKQQAQPSKATKPTKAYSDEYREHVDVAADPIVKYMSKEQLQKAIERTRKQMVEAAKKMDFIEAAQYRDELIKLEDLYQKTTTTTMNTIKKLTRPRNGRMLGGVCAGIGEYLGIDPTVVRIICVLLSIGTIGLALLVYLVLCFVIPESYMTGIKTPYLSVIIKFISTNFFCQYQQIYYLSYFHTGLYEKQTGTFCLIIFERKYKIGGGLAMRKVICSIVCALLLVSCGEYNKMLKSTDYELKYDYAKKAFERKKYMQAATLLEELVAIFKGTDRAEESLYLLARSYYLNKDYITSGEYFQAYYKNYPKGEYTELARFYCGYGYYLDSPEAKLDQTGTYRAIDEMQRFLDYFPNSERAKQAQDIIFELQDKLVYKELLNAQLYYNLGNYMGNNYQSAIITAQNALKEYPYTRYKETLSMLILKSKYQEAVQSIEEKKPERFRDVIDEYYSFINDYPSGEYSKEAENIFKVANKYVKDMDYKKTNAPTNTVTRDMVALSSDTGNIYETVCIIAKRANQIAVEMKTDLEKKLQEFASCNDNLEEVFENREQIEISRYYEKLPKPVLIATQEYIEGKVYYKNPEKEKSAIEMINRILIRSKVVQIAYSYFLTKDKTVMEAEKELFFSFEKSYELYHLLLTLMVELTDTQAARVEAARMKFLATPEEKNPNMRFVNNRFIEQLRNCDDYKDYHEKKPVTWTNEPKFLRDFSERIVKSELYKEYMDSSDDSYENDCEFWKKALRALICTDEELTELLEQKSLYWNDDLEIITTFVLKTIKQFSEENGGPQSLLPMFKDDDDAEFAKELFRNTLIHGGEYRNYIENFIKNWEIERVAFMDIVIMMVALSEFHRFPSIPTRVTLNEYIELAKAYSTSKSGQFVNGVLNAIADNLKKEGVLTKEMTVLSIFLQAATGSGMSSILMMVALIAIFYFFMIRPQTKRQKEIRKFRESLTTGDKIVTAGGLFGKIKEVKSDSFIIEIAENTRVRIAKDSVYPSAAEAKDSGADQAKMEENISDRIVAKFKSIIQRIGTAFRQERTRELFTFLGFVLLSLIFWFMQGLNEEVENSFKIPIELQNLPEKTTLINDLPSHIEVRVRDKGPVMLGYAIEGLSPLRINFQEYDKGRNSFLLLSSQLETILRKSLRSSTSIVSIIPDTLKVMYTHNAGKRVKLVVKGVASTTPQCVLSGDMTADVDSVMVYGESSLLKRVKEVYTTDFEAKKLNDTLRTVVKIAKIPNLRIVPEQVTVTIPVEEMTSKILDIPVIPQNVPSNWSLITFPSSVQLSCMMPFSKFAAVDEDSFLLGVDFLDLSRRRLSDKLGVKILNAPEYVRNIVLSQDSVDYILEQKRPAFVVPVDSANRVTPDSIMRRIGITGGIGSGKSVVSRLLRIMGYSVYDTDSEAKRLMESSLEVVQKLSECFGRDIYHNGRLNRGLLSSRVFGKSDKIVLLNSIVHPVVRFDFYRWSESLNEEICFVESAILYESRFDELVDEVWTVTAPEELRISRVRQRSGLTEEEIKKRMAAQLSEEEKQRRAAHIIWNDGNVSVIHRVLSLLKSLEMLKTILSISGKPGLFKLISQAKNMLIVESLQTGKRQPAYAHEKIISLGDIAIFTDEEDVPLSEVLNAIKEKENGAKVTLDIKKADNETLRAYLAEVLPNFDRERVYPTDIKKLISWYNLLVETGNTDFVEEEKPQKDADVENTAATDDSVNEKEEKSKTKKATKKKAEMNSSSLSAARTPFIRLLVPLLAGILYQEFLCLPIWGNLIPALCGLVLWSSFIKRDSIEEQYHKRSIFGVGLFLIVFSIGAILHGTQNRISQQPSGFYPIAIAHVNDKAVEKTNSYYCPVTITALSDTNGSIVKYKEKIALYFEKGIQARRLEYGDIIGFEFRPKAIPSNTNPYAFDFASFMKHKGISRSQYLTGKQWKYIGEKPKSNLRKATSDLQKHLSDQLQSCNLSKNSTLLLRALLLGERQEFPQDLRSYFSATGLSHVLAVSGLHMGVVAPLIYFLFFPLSLFKSCRKLRPLFTLFVLWIYAYITGLSPSAVRACIMASFLLTAEFLDRRNSSLNALFAAAFFMLSYDTNLIFDVGFQMSFSAVTAILLFYTKLNIGGNSPYFVVRWLSSCVAVSIAAQIGALPIAVYYFHTIPLLFLIGNIFVLPLLPVVFGLSFLLLLLSALHIPYDWLGNTVDFLLQYIQQISLHIYKLPWSHIESVWLETRYLWLYFICGILSYITVKNRSKKTLWLTLGFCIGFLIFDLCTYKSPQPEIIVYDSKKSTVVQLSDKARCYILLSDTLTSGQRVVGEEYRMKNGKTQYEIFQHGSPGTKDNTGFIDYPFAQFYGKRLVLLGKQEWDKLSIGKKLTIDYVIIGKMFNGRIEDILKLFSVRQFIIGPDVHPRRATKLQNDCFENSIPCHDIRTQGAWIHTLDPMIDFRLKVFCSVAHNLSFTKASKELYVSQPAISKHIQELETEYSTRLFERMGTHITLTPDGELLLSHAEKILKQYKQLDFEMNLLTQRHIGELRLGASTTIAQYVLPPYLATFQQKFKQIKLSLINGNSSDIEKAVEEHRIDLGLIEGCSRQIHLHYTPFMQDELVCITSTRSRLAKLEEITIEELKRIPLVIREQGSGSLEVFEKALGTRQLKLSQLNIIMQLGTTEGIKRFLYNTDSVGIVSIQAVSSEIADGKLKVIEISDFDCEREFCFVQNTGQTGGVESDFMRYMTRRFMKRKYGLVGYPLGHSFSRSFFQQKFEDEHINATYENFEIQDISCLRQLISDNHELCGLNVTIPHKTAVIPLLDELHPLAREIGAVNVIKITRQGDKIFLKGFNSDIIGFTNSIAPLLDDRMTKALILGTGGASKAIHAGLKALHITPTFVSRQKRGDILSYEDLSPDLIDNHKIIVNTTPLGMFPHIDKSPNIPYTALSPEHLCYDVIYNPETTLFLQKAARQGCKIKNGIEMLHLQALAAWKIWNEMIQPEKTSKYAVVVSLLTLCFIACNGKASEISNHSSNPIVTIERFDKGLPSYVQETDSAKIFLFIDKYTPFFPVYCRHILGLGDAPSFQKGLKMFLSNEAISQLYADTETKFSNDTVWITELQNAFLRYNELFAPQKRPRILTHISGLNQSIVTIDTTLLSVSLDCYLGENYPLYEQRYYNYERNLHESDRIPIDVIEVWLRTLYPYQSQRNALLDRMIYEGKILYCLSQIFPRTNEYVLLGYSDKQAQWCKENEAEIWKQLIGKKHLFNTESMLINKYIEPAPFVSVLHQDAPGRLGRWIGLQIIKAYANEKKKEAIEIIETTDNGGEILSASKYNGMKHSYFSRRLLSVFMAFALGLSVLLAKDFVVVIDAGHGGHDPGSLGSKAKEKNINLGVALKLGRLIENNMQGVKVVYTRKKDVYLTLQERANIANKVQGDLFISIHTNSLDKKSPNRRKVAGASTWTLGLHRSKENLEVAKRENSVIYLENDFSTRYEGFDPNSTESYIIFEFMQYKHMEQSINFASDIQREFVSTAGRVDRGVRQAGFWVLAKTSMPAVLVELDFICNPTQERFLNSESGQEKMAKSIYNAFVKYKSDYDRKQNAGKRVEESPSSSAVVSPDKKTQTGDSNVEVSEQAEKSGVTYYKVQFMALPRKLPANSKEFKGLSPVEYYKDGGMYKYTYGKSTDRDEIQKQYKKVKSLFRDAFIIKFRDGKRVYMKKWFGKEVKIALSVLASILILYVGINYLKGINVMKPSNYYYVQFPNVAGLAQSAPVSIDGYKVGLVQEIVYDYDANGAIKVLLNLDKKLKIPVDSKVYLETDMLGTASIVIDLNPHVSEYYDHGAVIEGEVKSGLMQNIQGELLPQFALLLPKLDSILSGLQTLVNDPALSASVKRIDHITANLERSSVQLSQMMKDDVPAILDNVQGITAQVNQFSGTLNSLPLQSTMISVQKTSDNLQQITNHLTSPDNSLGLLLNDRLLYDKANGVLGSVDSLMIDLRLNPKRYVHFSLFMGSEQHVQLWDRCLTIIKDNINEEAFDSLFKPIVSLGFDDNVLTLLVPSHFVIEQIEEHYLSLLKKVLPRIYGASVKLLYRVQIVRQPEATVDLTATTKSTAVKKMQQSMPDLLDPFKQRVYDELDPRLNPIYTFESYYQGASNMLARTAAESIAANPGRNTFNPLFLFGESGVGKTHLIQAIGLRIKENNPASRVLYLSAHDFLVQYTDAVRNNRVNDFISFYQSIDVLLMDDIQEFAGKTQTQNTFFHIFNHLHQSNKQLVLTCDRPPVELVGMVSRLLTRFKWGLTAEVERPDYELRYDILMSKVRRDGLSISEEVIDYIARNVTDNVRDLEGVIVSLMVRSSVLKKEISIDMADQVLAASVKMTQKQITIDSIKEAVCGYYGLETSRLLERTRKREVVVARQMSMYLAKKYTTLSLAGIGDVLGKKDHATVLHACKTISEQVGVDKKLRSDLEEIEQRIQGMISSLKERRTIRKYLNKDIDEQLLNELLETAFRAPTTQNMQVYSVVITREQENKEKLAPAHFNQPTVTSAPVVLTFCADFNRFIKWCEQNHAEPGYDNFQSFVTAAIDALLVAQQFCTVAEISGLGCCYLGTTTYNAPQIAEILRLPKFVIPITTLTVGYPADIPAQIERLPIEAILHHEAYQDYTPKAIHRLYFEKENLAENKKYIEENHKENLAQVFTDVRSPRKDNELFSKTFLDFIVKQGFRLPDMEPIVYTYDEAYQASLEYFKGDELAARVWVNKYALKDSYGNIYEKTPDDMHWRIANEIARIEQKYPNPLSAQELFDLMKGFRYIVPQGSPMSGIGNNYQVGSLSNCFVIGLDGAPDSYGGIIKIDEEQVQLMKRRGGVGHDLSHIRPKGSPVKNSALTSTGLVPFMERYSNSTREVAQDGRRGALMLSVSIKHPDSESFIDAKMVEGRVTGANVSVKIHDDFMEAAIAGKAYRQQYPIDSDDPKVTKEVDAQAIWKKIVHNAWKSAEPGVLFWDTIIRESVPDCYADLGFKTVSTNPCGEIPLCPYDSCRLLAINLYSYVVNPFTKEAYFDFDLFRKHVGLAQRMMDDIIDLEMEKIDKIIEKIKSDPETDEVKCTELNLWYKIQKRTLQGRRTGVGTTAEGDMIAALGLRYGTEEATDFSEKVHRSLALAAYRSSVSMAKERGAFSIFDADREVDNPFINRLKKEDEELYRDMCKYGRRNIACLTIAPTGTTSLMTQTTSGIEPVFMPVYRRRRKVNPNDPEVRIDYVDETGDAFEEYVVYHHKFITWMQVNGIEVKENYTQEEVDALVARSPYYKATANDIDWLQKVRMQGRIQRWVDHSISVTINLPSDVSEEMVGQLYVEAWRSGCKGCTVYRDGSRSGVLISAKKEEKKPVAAINQPAETLVRPIELEADVVRFQNNKEKWIAFVGLKDGKPYEIFTGLADDDDGIFCPKNVVKGKIVKAVNEDGTKRYDFQFSNKRGYKTTIEGLSDKFNPEYWNYAKLISGVLRYGMPIPQVLKLVSSLELDSQSINSWKNGVERALKKYLPNGTKANGQTCPHCGNETLIYQEGCLICTSCGTSKCGMKIIFEIYYHTRWGESLFLSGDIDELGANEENRAVMMDYQGDGLWKYTMELPASAKKFHYEYLVKSGEGIRREWGSPHSFSPGRNAGKYRLVDRWRDVPANLPFYSSAFIQGIFFRQHADSVVETIEQGTFTVKVDAPQLRPDERLVMVGDCPELGDWDVLKAPLLNDSAFPEWQITLDGRQLKFPFEYKFVIVRTHQREVVAWETGENRICREKPQNPSEAVVVSGLRFNGSESQWRGAGTAIPVFSLRTDYGFGIGEFIDLKYLVDWALRTGQSFIQLLPVNDTTMSGTWQDSYPYNANSTFALHPQYLRLSEVGYLNDEVEQARFDALREELNRLPDVDYERVNRAKMEYLRLLFEEQGEATLSSDGFKAFFRDNSFWLRPYAAFCSLRDRFGTANFSCWEEHSFYDESAIADYCAVWSPWYKSVALYYYIQYHLHVQLSEVKEYAHRAGVVLKGDIPIGISRTSVDAWVNPQLFHMDSQAGAPPDDFSIEGQNWGFPTYNWEVMARDGYAWWKARLRKMSEYFDAYRIDHILGFFRIWEIPFNAVHGLLGHFNPALPFSPEELQGYGFRFDASWQTVPYIREDFLDEIFGAYTGEVKERFLVHKGDGRWDLNVLVDTQRKIVGYFSGASDDMSILIRDGLMRLIDDVLFLEDPDRPGYYHPRISAQHTHVYHSLDEDQKSCFNRLYDDFYYHRHDVFWKDEALRKLPALISSTDMLVCGEDLGMIPHCVPEVMERLQILSLEIQRMPKESWREFGDTWAYPYRSVCTTSTHDMSGIRVWWEEDRARTQRFFNEILGEQGEAPSFCEPWICEKIVELNLFSPSMLAILPLQDWLSIDGRLRRENPQEERINIPAHSRHYWRYRMHLSIEQLLEEGVFNTRLRELIERSGRMKKIAKSLTDLIGNTPLLELSNYNKKHELNGILVAKLEYFNPAGSVKDRIALSMIEEAEQKGLLKSHATIIEPTSGNTGVGLAFVSAARGYRLILTMPDTMSMERRNLLKALGAQLILTPGSEGMAGAIQKAKELNEEIEGSIILQQFENPANPAIHAKTTSEEIWRDTEGKIDIFVAGVGTGGTISGVGTGLKKHNPAIKIVAVEPKDSPVLSGGKAGSHKIQGIGAGFVPKTFDASVVDQIIPVSNDDAIRTSRELTAAEGLLVGISSGAAVFAATRLAQLPENKGKTIVVLLPDTGERYLSTVLYDFEGYALMRVKPDLSFRRLWDISFGFFGVQIAYALQSANISRIFATLGADPHNLSYFWILPPLAGIIVQPIVGALSDRTWNRFGRRIPYLIAGSAIAVAVMCLLPNAASFKGYIHAMWFGLIALMMLDTSINMAMQPFKMLVGDMVNERQKGLAYSIQSFLSNAGSLVGYLFPILFTYIGISNIAAPGVIPDSVIFSFYGGAAILILCTLYSSIRVKEMPPAEFQKFHQISDKELTEKNNFISLLRHAPKVFWTVGLVQFFCWSAFMYMWTYSTGAIADNVWHSTDPASPGYQSAGNWTGVLFAIQAIGSVCWAPLLPLIKNRKAAYSLSLLIGGAGFTLVPFIHNAYLMFLPFFLIGCAWAAILALPFTILTNSISGKNMGAYLGLFNGTICVPQILAALVGGSLLRWLGGSQPVMLGISGILLFAGALCVFAIKETFVHESETERIEKGDMKFIGAHVSAAGGVENAPVNAHAIGAKAFALFTKNQRQWQSPPLSDKSIELFKENCEKYGFSPQYILPHDSYLINLGHPQEEGLTKSRVAFLDEMRRCEQLGLKLLNFHPGSHLKEISTDECLARIAQSINLALEKTDGVTAVIENTAGQGSNVGFKFEHLAVIIDWIEDKSRVGVCIDSCHAFAGGYDLATAEGYDATWREFDRIIGFEYLRGMHLNDAKKGLDSRVDRHDSLGAGVLGMGFFERLMQDKRFDNIPLILETPNENLWPQEIEKLYGMTFPEMNKVYHWIFFLLLLAGCQDRTDSSYVITGKVVNSLTDGNVVYLSHSNGDELVNLDSAIVDGGVFSFHGVQEEPIMAYLRFNRYLDSLAVPVLFVLENGAMEAVMDTSYSSVAGTEQNNIFEEYKREAYRLDSLRRCLHSHYVEQVEKRMMDAGLEQSMCDEDFRLSSQEEKLAYRFIRLNHYSPAAIWVLEQMQSRFDEDELRSLLSGFGGRSKNAQILSDISLRLRNADKVEPGNPYVDVPLIEYSGRKENLSGYIGYARYTAIGFWRSDSEPSCRDMTKFGELYRAYGYRGATFLSVSLDKKRDIWREKVRTLGLPSHHCAAAEPDVIETRYALVSVPNFMLIAPDGSIDSRNLTVTKLEQRLQELLPYRARRDTAVSSVPDTTGFVKRLSIMKFNTIDDLKAAGFEGFIPVAQLQADSTAIPRTAGVYMVVYTGENIPEFLSRGTGGFFKGKDPNVSITELETNWVENTCVVYIGKAGKLKNCKATIQSRLKQYLDFGAGKKSGHKGGRYIWQIKNSGNLLLCWKPTPDEDPETVETALIARFKEQHGGHRPFANLKDMLLQITQTFYTKIIVMGNIEKIIQAKIFSLYKKQALYAFSGSMSGVLLFKFPLIYQHDTFCRSASLYLHKKQKQTDMAKLSQIRRLAILINKLSAVRYVPTDALIAHVENTLALYDNKDSNYSQRTMQRDFGLIDEMFGIVIRNDKSRGYYIAELDEMTDNYKELLLNFELLSSINADSVLQKYVLAEHRHNAIRHELIAPLLKAIRKRNPIEFDYTLVRHNGKIVHKRLMPHFLKESQYRWYLIGYDTDSKLKSFGVDRISAINILEDTQFLRDEHIDIPSLFRESYGIWNNPEDPVEEIVLKYDSVDGAFVKTLPLHHSQQILSEDETGITVKLRLRITNDFVMELLSRSRSVEVVAPHTLRTRLYDTLRQAAERNKPIETECDMQVILKEDVANLGYKDDVVTVKSGYGRNYLIPQGKAVIASPSALKVREEDLKQRAHKLEKIKADALALAAALEGVSLTIGAKTSSTGTIFGSVNNIQIAEALEKLGHIVDRKQIVIKDTVKEVGNYKAIVKLHKEVSVEIPFEVVAEMAQAQSEIRYLTPPSVDIKKKKYCRFKKNGIKYIDYKDPEFLKKFLNEQGKILPRRITGTSLKFQRRIAQAVKRARHLALLPYVTDMMKMNHYETVFILTPVLSDVQMKEAVEKFKTILTEQGAVIVNEENWGLRKLAYPIQKKTTGFYTLLEFDAEPSVIAKLEIQFRRDERVIRFLTFRMDKFAAEYAAKRRSVKSSNKEEVKENMKKSLIALAFGTLGLGIAEFVMMAILPYVAADLHISIPTAGHLISAYALGVCAGAPMLTLARKLPLKNILLGLVAIMMVGNIFASLSPNYWTMLVARFISGLPHGAYFGVASVVAEKLADKGKGSEAVSIMIAGMTIANLFGVPLGTSLSTLLSWRLTFMLVGVWGIIILYYIWKWVPQVEGLPDTGFKGQFRFLKTGAPWLILGATMLGNGGVFCWYSYINPLLTKVSGFSTESITLLMVLAGFGMVVGNLLGGKLSDKYTPGRVAASTQFILFMALLGIFFVAHINWLTALLMCLCTAGLFAVSSPQQISIIHFAKGGELLGAACIQVAFNLGNAIGAYIGGLPLQAGLGYQYPALIGAPLALVGFILLTLFYKKYEPKKAMLPTRKNQGWLPSIFNDFFDNDWMEKANATAPAINVVEHENDYCIEVAAPGMTKDDFQIHIDDNDNLVITMEKKSENKEERKKEHYLRREFSYSKFQQTMILPDNVDKNKIAAHVEHGVLSVELPKLPVQSNDGVVKTIEVKMTSALFDNRRHSDICKRRANIFFEVYCSGMYDNSYPKWTKLFHRVIIVTFFGQGKTQGIDKMEIQEQQFVRELAESRMQIELLRNRVLLRYYAQLLELDIMEQTQEVKALMSSINTLERYARKYEPKESAIESAPVENGGSGEVFRNKEGESESIDVLSGKTMPCVSARSGVENMTAVPSRSVAVRNLPNGLKIESVTTRGKSHRKMKTIREIYRIGYGPSSSHTMGPRKASEIFLNRHPEAVAFEVILYGSLAATGKGHLTDVAILDTLQPHAPVEIVWKPSVFLSFHPNGMTFRSKNSSGEVTDEWTVFSVGGGALAEEGKPFDKTPELYEMNSMTQILSWCERTGRSYWEYVQECEDHDIWDYLAEVWSTMREAIERGLDQEGVLPGPLNLRRKASSYYIKAKGYKDSLKSRGLVFAYALAVSEENASGGRIVTAPTCGSCGVVPAVLYHLQKSREFSDTRILRALATAGLVGNIVKQNASISGAEVGCQGEVGVACAMASAAASQLFGGSPAQIEYAAEMGLEHHLGMTCDPVCGLVQIPCIERNAYAAARALDANIYSAFTDGSHRVSFDKVVAVMKQTGHDLPSLYKETGEGGLAKDYEQMMNFSELNIEMVFALMSGKLSAAINRKLYRSFRKLSIDITPEQWTVLYYLWSRDGVTQQELCNVTFKDKPSMTRLIDNLEKQQLVVRSPGVKDRRINLIHLTDKGRELEVATKPLVTAIMRTALDGFSDREVEMAGRMLTKVFGNLKNSLEDMIKYMRHIFIFIVVWLAAGTICSFAQYKPDRLGEGFEAKTIAMPDDYSGRVVTTLVRSLSSCDTHKAVLYVHGYNDYFFQETLARTFNDSCFNFYAVDLRKYGRSLLPEQTPFEVRDLQEYFADIDTALTLIREEGNTDIVLMAHSTGGLITSLYCEAYRNDLPVQGLILNSPFLDMNMNWFYEKILVPIVSAWGRWFKGTKISQGNSTAYAESLLKDHHGEWNYDTDLKFKVSPPVSSAWIRAIHRGHNQIHKGLHIPCPVLLMYSSQSVDGNKWTPQHQSGDAVLDVKDIARYGRMLGPKVTEFEVQEGMHDLVLSKPSARQAAYSEMFRWLRSNGLNEMRTILETQRLILRELCPNDFHEVCKLLQDNEVMYAYEGAFNGTEVREWLDRQIKRYAEDKVGLWGAVLKENGELIGQCGITMQPYREQTVPEIGYLIRKNFWHKGYATEAARSCADYASHILGIKRIYSIIRDNNLPSQGVAKRIGMTPGDTIVKHYRGIDMPHIVFSMTLGEMAKYLYFWICSCAIVLFSCGDNSNEANAQYEKARKLFENGQYANAKNAIDSIELLYPKAFKQIKAGMLLMCRVKQKESEQNLLYIDSVLKVRQTELEAVKKNFRFEKDAKYQTEGNYIYKKLPKQAAINRSQLKVLVTENGQMQLASVYYGSTPIKHSSIRATLPDKSKAETLVIGYDGANNYRFTNDGKYTEIVTYKDGQCSAVAALIANNTSKKITLTYLGGNRYTLSLDPVTREAVKATRELANLMKNVDDLKREYQLNVRTLELADKQVLQLEKQQSEQNAEMPEKSYFTLDEKENVLSVYRQLLRNSRPVLRVEDFNRMRRLISEAVETGHYQRNKQGINPVVRNLNTALILCDRVGLERSMLISVLLFNLVVSEFLTIETVKKEFGDDIAQLIRGLIKSNSLYAKQAAVESENFRKLLLSFAEDIRVIIIMIADRLCVMKMINHHPNEKYRYDIACEASYLYAPLAHRLGLYSIKSELEDLSLKYTNREIYDQIAHKLNETKRNRDKYIMEFIQPVKQKLEAEGLHFEIKGRTKSIFSIWNKMKKQKADLEDIYDLFAIRVILETPLEQEKADCWKVYSIVTDMYQPNPKRMKDWLSIPKSNGYESLHITVLGPKQRWVEVQIRTRRMDEIAERGLAAHWKYKGIKSENGLDDWMNNVREVLEAAGNGGALELMRDFKMDLYDKEVFVFTPKGDLYKLPLGATLLDFAFLIHTGLGCKCVGGKVNGKIETIKYKLKSGDTIEVLTSPNQTPKQDWLNIAATSKGRVKIKQALNEQQNKAAEYGKELLQRRFKNRKIEMEDGVMMRLIKKMGYKTVTDFYNELADEHIDVNRVIDLYLEIDKKENEEQYETRTAEEFTLQKEPDESKEDELVIGGDVKGIDYKLAKCCNPIYGDEIFGFVSTEGTIKIHRKDCPNARHIYSRYRYRVVNARWSGKMGSKYVTVLRVIGNDDIGIVTNITSIISKEKNIYMRGISIDSNDGLFQGHITVTVDDISSLNSLMKKLKTVKGVKDVQRGSIRMFTPEDLDLFAEKGIDVHTVEEQLASFKSGFPFLRILSSASVGNGILSLDEQQTQYYLDLWEGYLKDNHKVVKFVPASGAASRMFKDLFAFLSADYSEPQTDFEKKFFNSIEHFAFYSDLDEACLKNEGKSITDLIESGNYKAVVSNLLEAKGLNYGSLPKGLLKFHRYATNNRTAMEEHLTEGALYAASSDGEVNIHFTVSHEHLADFKALVAKKKADYERRYGVRYHISFSEQKPSTDTIAVDANNEPFRENGRPLFRPGGHGALIENLNDIDAEIIFVKNIDNVVPDRLKEPTVRFKKIIGGVLVSLQTEINRYITMLKSGKYTIDDLREMIQFLHKKLFVRNEETKHLEDAELALYLLRKLNRPIRVCGMVRNSGEPGGGPFIAYNQDGTTSLQILESSQIDMSNPDAKEQFESGTHFNPVDLVCAVRDNKGEKYDLPKYVDKNTGFISLKSKNGRELKALELPGLWNGAMSDWSTVFVEVPAETFNPVKTVNDLLRPQHQMTFEEFGLSEDVMRGLDAMNFKEATPVQEQTIPVILQKRDLIACAQTGTGKTAAYILPLLNLLTEKQGDGDRVRAVIVAPTRELAQQIDMQFEGFSYFLPISTVVVSGGGDGASWDQQKRGLTMGADIIIATPGRLISHLNISNIDFSGVECFILDEADRMLDMGFYDDIMKIGKKLPENRQTVMFSATMPPKIRQLAKNIMNEPVEVNVAISKPNEAIDQSAYVCYESQKMGIVDWLFKEPAGTKTIVFSSSKQKVKELAFSLKRKKYKVEAMHSDLEQSERESVMLDFKNNKIDILVATDVISRGIDIDQIGLVINYDVPHDPEDYIHRIGRTARANADGTAITFVSEKEQGKFHRIELFLGYDIPKRELPEGLGDAPVYSPKQGRGGQRNRGGKRGGTGAKNYGKGGKRKPKKNNRGSQSTEISRKPERHHGRSKSSGKQSGGVEQMECSKAQSIDEQSLQKAQFLFESGDIDKIEVGTIKGLCQIHRSLFEGLYDFAGKIRNLNIAKGGFRFANSLYLEVILPVIEKMPESTFEEIIAKYVEMNIAHPFMEGNGRATRIWLDLILKKNLGKVVDWQTIDKDLYLQAMERSPINDLELRVLLQPALTDKVNDRTVIFKGIEQSYYYEGYSRKMDTLEKKMKVKELWQLCFHDDERFVNLLFDNLYRDENTVCFEKGGEVTTALQMLPYRMSFGETSLDVSYISGAATRPEYRNRGLMGRLLKESFEIMRSRNIPLSALIPAESWLYDYYASKGYASVFFRQELNFSSAHRFYGDGYHRVAMSMDELYRFFDEQMRRRSCCIQHGREDFNVICDDIYLDGGDVVALADSQNRLSALAFVVPGDDAVFVKELLAINTEAKEAMLHEVQSAFPGYSLRVFTEPMSENGAAVLMGMIRIVDVRRVLEAVAKNNRSLRRVFRVHDPLLPVNNGVFLVEEGECYEGVTNPCDFDIDIMELAEIVFGGSKLSSLLDFPSVRPYMSLMLDMKSFGYAIVSIFLAVVVLLTSGGISIVRCCQTHCFCLQNSGTQEVDLLSDRYSSESRNDCCKTGGIADKHATKGHSPFCKHVKVEKLNLPIVDIPTGTDWGIQGTIDLTYSFGSVIFAPVTSVVKYITTSYMPPPRDYLKQIAILLIMIRYLIFPLFLLGSLSSAFSQVRGIVKDIAGEPIIGANVFWLGTTTGTTTGESGKFSLPETGTSDKLVVRFVGYRSDTIHIDRVDTVWEIVLQDGAVMDEVQVSARRMGTMKIRAGILNQDMISTAELSRAACCNLGESFTTNPSVDVSYSDAATGAKQIKLLGLSGTYVQMLAENIPNYRGVASPYALGYIPGPWMQSIQVSKGASSVKNGYESITGQINVEFKKPQTTESVSANLFANSLAKIEANFDGNIHLNQRVSTALLAHYENNLMAHDSNDDGFMDFPRVEQYNFQNRWAYMGDRYVFQAGIKALMEDRTGGQMRSYRATDGMPRYDIDIRTERYEAFTKNAYIFDKEKNTNVALILSGSLHRQDAGYGYKLYDVDQWNGYASLMFETEFDKRNSLSTGLSLNYDDYDQSYKLSHTGDTLGARDKEVVPGAYVQYTYNWNDKLMIMAGLRADYSSVYGTFVTPRAHVKWAPNEIFNLRASAGKGYRATHALAENNYLLASSRRVVIDPDLDMEEAWNYGVSAALYIPLFHKTLNLNLEYYYTDFLRQMVVDMDSDPHEVHFSQLKGTSYSHTFQAEASYPFFKGFTLTAAYRLTDVKTTYGGVLRERPFVGRYKGLLTASYQTPLGIWQFDVTLQLNGGGRLPQSYMLEQGIPAWNNRYKAYEQLNVQVTRYFRHWSIYVGGENLTGFKQKNPIIDASNPWGSNFDSTLTWGPMHGAVYYVGVRFNWERLMKQVKILWLVAALFCATTAFGKDIKTVVFKTTPEMHCNNCETKIKNNLRFEKGVKEIVTDLGDKTVAVKYDADKTTVEALIKGFAKIKYSAVPVTEKKEGEKSTCPEKTTCPEETEECCTPSKMKKYFLLICIAFIPVSIQAQWSLGGKAGINWSTINYPWSKLGDHADYLSGFQGGIIATYQFNNYFDMQAELFYSARGYTDDEFYLTDESGAVISNTYTCRTHYLDIPVLVKFFPCNRLNVQFGPQLGIGLSLSDKWKGINNDYSIYRDSAVDFSLAFGLGYEFNFGVFVDARYTLGLTKTIREVVKGFQGRNISLAVGYRVYLMKHIYFIVCISLLFLVSCNSQKWEEKKQLSTIPVSNNINKEKLMEGNEVEEKIVGDLDWDGLHRPRIYYAVATTFCGLFLSVLDGSICNVALPSIARELGVSSSDSIWIVNAFQLVIMMTILPFASMGERWGYKQVYLRGVIVFTIGSLFCALSHNLSLLVISRVFQGFGAAMIMSVNTSLIKLIYPKRRLGEGVGLNATVVAIASVAGPTLAAGILSVASWPWLFAINVPVGVVTFFMGRRYLPDNAVRVLGHRFNWKEALLNAATFGLFIGCVEAYSHDVPVTWVLGGIVSFVIIGTFYVRMQLRERYPMLPFDLLKIPIFSMSVVTSILSFTAQMLSLVAMPFLLATTFHYDAVGTGLLMTSWPLVIVFVAPLAGLMIGKVHPGILGGVGLTIMSVGCFCLSFIPTETGHFGLVWRLMLCGMGFGLFQSPNNHMLLSSAPPQRTGSASGMLATARLIGQTVGAALVALLFHLYGDSAPHDAMLLAGILTLCGAFSSCCRLKVSMPKMKITKKSITLLLAGLLCASNSFSQTYPKQDGVIRLLTYNTHYCKGGTDPGSLNDLNTKRFANILKALDADVVALQELDSAANGRWKRVLLDDIAKWSELDYVQVYGIAADYDGGSVGNGTLVKRWLPIKKIKKMKLSSDVGRILIRTDFEDFSFMSTHLDLDDKHRMNEAAAICTELDYIRKPVFLAGDMNDSHRWKNLAFSVFLEDFQIFSDTEGNTIPGREENTACIDYILFHDYKNSGIQNIESHIVRTITIDGQTVDLKDISDHYPVYVDIKIPGMSAIQQTTKNNLEIRLQLSSCELSVFSAEPINEIEIFSSNGCLIQRNQGENLQTTNVPQLPAGIYLVKVKSEEGYTVTKKILKRMKKNIILYSFIALLSGTAGCSDMLDEYPLDAISPETYYNNADELRSATNQFYGMFPGAASGYTESADVVCIFNLPAEVQGIRTVPTSGGGWNWEYLRAVNFYLSHSVRCDDVDAREHFDGIARFFRAYFYFEKVKRFGEVPWFDRELSSTDPELFRPRDSRDFIMDKILDDLTYAINNISDKKDLYNVTHWTALALKSRICLFEGTFRKYHGIPGYEKFLNECATASKLFIDNAPYAIYQTGAQPYRDLFSSMNAIEEEVILARDYDRSQNVMHEANANTLSPTYGRPGMNKKIVNSYLMTNGDRFTDQPGYETMQYYDEMQNRDPRLTQTVVGPGYMRINSDAVSSPNFGASTTGYQITKWVTDASGDGYLGSSNDYILFRAAEVYLNYAEAKAELGTLTQEDLKISIKKIRDRVGMPNIDMDAANANPDPYLCALESGYQNVTGPNKGVILEIRRERTIELLLEGFRYYDIIRWKEGKVFEQPYKGMYFPGLTQGSGDNRYDVFDMNDGTVGDKEKVDICIYTGKKPSVKNIRKFYKLGDEFVLTDGDKGNIICHDIEKEPRQWREDRDYLYPIPTQERLLSNGTLSQNPNWDDGLDFMNLKIKTSESSKKNSLKIAFLLCFLISVQFVFAQNQTIDLNMTDKPLSEIFKSIEKQADISVDFDETQINIHQKISVNIKNKKLTDALSMILSPLKYKYAIQGKHVIITNEKNRQKSESIVGFVKNPNGEPLIGASVLVKGTNNAVSTDIDGRFHIKATPKSRLVVSYVGHNTQEIAVTPGITMNIELSEKANIMDEVVVVGYGTQKKANLIGAVGYTDHKQLEKRPVNNLGQALQGAIPNLNISFGSGKPGEKTRMNVRGFASINQESKPLILIDGMEGNIDKINPRDVESISVLKDASSAAIYGARAPFGVVLITTKKGESGKTQVNYNGRFSFSKPTTRTDFLTTGYDAAMLVDEFMRSYNGVTYTRFTSDDYKELEARRFDKTENPERPWTVVQNRGGVESYMYYANFDWYNYLFDQSRPTWDHNLSISGGNQKINYLLSGNYGTQDGIYRQNTDKLRTANLMAKVSADAYKWLTVKFMARLYDSKYTAPGVGHGYNIPSLTFHAMPYLMPYNPDGTWVYQNPIQASGPSDGIHILIGDGTTKSIEENRYMTYSWSTIFKIMKGLTFTANYNFKHSTTDYMERSTQAKYSQYPGVEEVAQASWFSNKLIQEYEKSFYHSVDAYLNYDNTFNSHHVYAVAGFNYEQNHYKHHYATKLNIQSDELNDFNLGEKGKDVTVQGGQSKWALLGYFGRIGYDYAGKYLAEFNIRWDASSRFPKGHRAGLFPSFAVGYRMSEEAFFDPIRKVFSNFKIRLSTGSLGNQAISDCYPYIQKLNMQGLGGYLMNGEPVTYAAVSAPPSGKLTWETVIHHNLGLDLGFFDNRLNLSADLFIRDTKDMLVPGKMLPGVYGATPPKENAANLRTKGFELAVSWYDQFNLGNKPFSYNLSFGLSDSKSVITKFDNPMKEFAKSSYYEGMTIGEIWGYKIDGLFQTDEEAAAYAKAVDNSYVCENIFVTAVGDYKGLQAGDPRYVDIDGSGRIDDGEKTADNRGDMVIIGNKEPRYLYNANIGLSWNGIDISAFFQGVGRQHRYPDGNNMMFWGGFARPYSSFVPANFLDNVWSEENPNAYLPKIRGYAAQGNRSLAHKNDRYLQNIAYCRLKNLTVGYTLPTEWTSKIKLDRLRVYFSGDNLFTWTKLKSDYIDPEQITVNSDARTYPFSKVFSFGLDITFMNNIIQNIIHKFFNNSQPSTDDILFKKWLLSPKNREEKDQAISEIWDSCQNETPDAFTLSELETFHRNNFLPGKRANFRSTIYKAVATILLPILGALFTWLILDTPQDTEQLIECFVPKGEKAKQIFLPDGSEVWVNAESILIYPNTFKGDTRTLFLNGEANFKVSRDKKKPFIVKTATLDIEALGTTFNVESYSNSPQTIATLEEGKIKVSTKDSIPHETILSPNEQFIYDRDTHSREINIVDAQRLSNWKEGQLYFKNAPFGKLVKTIERKYNVTILYDQEKYKNNKLTVKFDHDETIDEVLSILEGILQNMKYKKNNDIIFINMSKNNTEPSCYTMNLELETYHLKRLIEGDTTSFDAIFIHYHPIVLRFLVGFIKDKEQAQDIAQDIFCKLWISHDRLGHIQSLKSYLFKMCRNAVYDSFDRQITEQNYLSHLEETAPQSTSVEHEIYAKELLSLMDATIASLPPQKRTIFNMSRKEGLSNDEIALRLNLKKNTVEKTISSVLTQLKKNMLAALLFLIPMYLGGVFVCIDPLALRALPLYFAAQNTGGECEMYIPFASAPMLFKMPRHVTGYGRRERVKKHMSAEIERKYTVKDQSYRQESIECKYYKQGYISIDKERTVRIRISGNNAFITLKGVTTGCTRKEFEYPIPVADAAEMLGSLCLPSIIEKKRYIYPYAGHKWEIDEFMGNNDGLVIAEIELKSESEQFDLPPFIETEVTGDPRYYNSNLAKHPYKTWKEKEMTKKIYVVLTLCLLFIGLPISATAQKATVIKGIVRDSITHEPISYASVFFVGSDKGLMTDDDGKFAVSVRDNFLNVRFSTLGYREKTVFVKKGAENDLVIDLVPSDYVLKEVVVKPKKEKYSKKNNPAVEFVKKLIERRHVGDPKNHDFYNYEKYEKMTFALNEFSEEQKKKWLFKKFQFIFDYVDTSEVSGKPILTVSIKEKIAENYYRRSPETEKSVVTGIKRAGIDEIFSQESVQMLCEDLFREIDIFRNDITLLNNRFVSPLSNIGTSFYKYYLLDTILVDGVKCVDLGFVPFNSESFGFTGHIYVPEGDSTYFIKKVKLNVPRDINLNYVENMYLEQDYERLEDGTRIKTKDDAIIEFRIMPATQGLYARRMTTYDKFTFTPPDDLSVYDFEGREKVEVDAQAKPEEFWVDNRHVPVKKKENAVDKLLARLREVPVFYYTEKVLGILISGYIETGKDSKFDFGPMNTTISANEIEGARFRIGGLTTAQLNPHWFARGYVAYGTKDEKVKYSGEVEYSFNKKKFHSREFPINSIKLSHSYDIDQLGQHYLYTNKDNVFLSLKRKGDNKATYLRKTELSYLQERKGGFSFGLGIRNEIQQMATDRIAFIDGYGKKIKDYMQTNFEVKLRFAPNEKFYQTKSQRFPINLDAPVLTLSHNFAFKNFLGSKYSYNHTEFGIQKRFWFSAFGYFDAIVKAGKVWDKVPFPMLILPNANLSYTIQPESYALMNALEFINDQYVSWDFTYYANGALFNRIPLLKYMKLREVFAFRGLYGSLSKKNNPLYNKDLFVFPKGSTEMDKMPYMECSVGLDNIFTILRVDYVWRLTYRESPNVSKGGVRIALHFSFMRKVFVWMWLALFLGGLISCVSSGDSSRWELVWEDDFNGTSFDTATWSKIPRANPEWARHMSDNEACYEMRDGNLVLKGIVNTDLENDTAPYITGGVYTKNKRGFHGGRLEVKAKLQGAQGAWPAIWLKPCDEAQWKWPWAGEIDVMERLNHDSIAYQTIHTAYTIERKQTRNPRHGSKGTINPDDYNVYAVEMYPDSLVFFINENRTFTYPRIDTGEGDELQFPFKKPYYLLIDMQLDGGWVGPVDTLDLPVEMVVDWVRYYKEKEMKKILLSALTVFTIMAQAANPFFGTYKTPHQTVPFDKIKLSHYEPAFKKAIEENQKEIDAIVNQRSMPTFENTIEALDRSGQMLNRVASAFFALLSAESNDEMMEISQRVQPMLSEHSNNISLNEKLFDRIKFVYDRRDQLDLTPEQKTLLKETYESFALSGAELKGEDREQYRKLSSELSQLTLTFGQNVLKETNLFSMMLSENDLEGLPQSARDAAAALAKSKGKEGFMVNLSYPSYSAFMKYSSRRDLREKLYRAYNSRNLSGEYNNIPVLKRIAEVRLEMAKLFDKPNYAEYKLQRTMAGNSANVYNLLNQLLDAYKPAALQDVKEVEGFAIGKEGKDITLMPWDFSYYSEQLKHIKYDLNDEMLRPYFEVNNTIKGVFGLATRLYGLHFTKNPKIPVYHPEVEAFEVTDNDGNYVGVIYTDFFPRDGKRAGAWMTEFKGQWKEENGKDSRPHVTIVMNFSRPTSDTPALLTYDEVETFLHEFGHALHGLLSDVTYASLSGTNVYRDFVELPSQFNENYLSEKEFLDSFAVHYKTGEKIPVELVEKIKKSSQYLAAYSCVRQLTFGNLDMAYHTITAPVDDAIAFEKAAIDKTLVLPDVEGTLIAPQFSHIFSGGYAAGYYGYKWAEVLDADAFSVFKANGIFDPVTATSFRDNILKRGGTENPMILYKRFKGSEPTIDALMRRDGIIKMKKRILFLIAVYFWFFVMFVLQKPLFMLFHWDIYGKIPLMEWFSVMWNGRPLDFSMAAYLTAIPALFVVATVYLQKKWWIPVYRVYFAIVSFVVAAITLGDAVLYSYWGFRIDATPLFYLTSPADAVASIPAWETVLIVFLIFVYAALLLWPMWRLSGKTGSWQRPKKSILSFACLLLLVASLFIPIRGGFTVSTMNVGKVYFSDRMALNHAAINPVFSLMSSLSKSEDFSSQYRFFEPEKADVIFEPLRGGGPSVYPADSLQWVKARPNVLLIVLESFSGVAMESLGGIPGVMPNLEKIASEGILFTNFYANSFRTDRGLTSILSGYPAQPTASIMKYPAKSQSLPGISKSLRKAGYDTQFLYGGDADFTNMRSYFISMGMDNIVCDRDFPLSQRLSKWGVPDDVTFEKFYSLIKEQSREPFMKMFLTLSSHEPFDVPMNRLEDKYLNSIAYTDSCVGDFVEKLKRLPVWDNTLIVFVADHAKRYPQNVENHDIVRHHIPMVWAGGAVKRPLVVDEYLSQMDLAATLLAQLHIPYDDFTFSKNLTDSTKEHFVFYAFPDGFGFVDKDGAAVYDCASQSILIGQNDSNAIHLNKGKAYLQKLYDDLARRMEIRNTLPEDMDRVMFIFEQARQFMRLNGNLHQWTGGYPSEEVLEADISSNSSFVCVDDQKEVVGTFCFRYGFSPEPTYNVIYDGGWLNEKPYGVIHRIASSGKVGGVFSACLEWCSRYVDNIRIDTHRDNRVMQELLLRHGFRRCGIIYLANGDERIAFQKEVMKKLLLSLCLMATLGSFLLNAEEKMSPSTQNFLRSYESTSTISQQAKLKSTYAINQNNGEMAVSAFLYLVDENNLDGLEENQVIINAQYGTILSTNIPADNLISVSQLPSVKYIEIGRPVHQRMNNVRSEQFSNVNKIHEGTGLTQAYTGKDVIVGIIDGGFQYNHINFYDTEGKNLRIKRVWNQNQSGTPPTGYYYGTEYTNAEEIIAAKQDYAASHATHVTGIAAGAYKGNEYYGIAPDADLVLVSYNISDNSSSNTSITDGIKYIYDYAESVGKPCVINMSLGYHIGPHDGTSTFDRICDELQGEGRLLVGASGNEAEYNIHATKTLKKGDTNMKSLVEFVSNWYLYGSMTSTVDIWGDAEKQLSARVFVYDILNKKEVYSSESFSTTASASKKISNPTGADGNIYISTATNPYNKKGNITIDLNLSSFDNRNYYIGFEISGPEETTINAWTDAYMSWLSNFGNNEFTNGDNNSTMGEIGGTGKRIITVGAYTSCNYIDHKNSSMWNNSGQTLNQLVSFSSLGPTADGRMKPDITAPGSMLISSFNSSTSSNRNGEDYNYVVKQENVNTVNYYYGSMEGTSMATPVVTGILATWLQANPKLTPEQVREILSNTATTDSYTGNIAGVGNNRWGYGKINAYDGLVYCLNHSGIEQIGTPTRPMVYPNPATDICYFLLQNDDKNVNVSIYTLNGTEIYSRYMGNINAGEQNQLDLSDLAAGIYFIHITGDKTNMTTKLTVKMMWKYIYAAFLMIAFTACHTNKTLEKSDKPASTANYTLPEHLSVSASFRMFWDAWNADLRQSGNNLEKYVPSELLIKRFSLHNQNGNYLLTGYLHTVADFKEENLLHIGGHCIKYSDSIYSFAIPLKILPQFITLPGITYIECSSPVRNRMIFYFSATGNSQYIAQRLAEVTGETLVSITECLKNHKYTWELLPGERVGFVTPVYFFGLPSIVSEFIRNLDLCVRGQHFVYHVVTFGTITGQSHYMMEKALRKKGLNLDGRYIVKMVDTYTLMFDLSDEEKCEKVMKDAEVCIDRVIEKVVNRVRGDFDNRKIPHWLAFPYTYCNRKKSTAPFVALGRCIGCGACAKKCPMGAIEMRDNRPIWIKEQCLQCLGCLHRCPVFAIQYGKKTIKHGQFVHPGVKMMKKRQLIWIGLIGVIMASCGGKYKITGKTNLIPDGETILLQKQNNEQFEIVDSATVTNGSFSFKGEQKSPTIAILVHLNDKQSQIPPQLIALEKGDIYVTLDSVSHISGTPLNDRLQMYETKRRSYDTRIRNITNRYLKDYLSGQLSDSTFVILKKAFDKEQKGLETLTRNYILANTDNVTSIYLFLQNSFLFSPEEQRELIAHAAPSFKKNPAVKKVSHMLDRLKNVEPGMPYIDLPLQTIEGKETSLSTYIDKGKYILLDFWASWCPPCRRQTPYLKQLFERYDKRQFSIVGISFDTNREEWKEYIQKNQIKWTQLIDQKGWESTTILTYAIQGIPHLILLGPDGKIISNNPSEKQLSNILSNQLKQMNENHTNQQGLTLEEIAVHKQALKIAIAEQQKNVNEAYRQVVAPFSEAKSVSGYIGGRLLNSFTMIESAIWGFRLISRIFRIFRKFRMFDTQNNAFRKLFEEGKKYINLQIDYAKLTATEKISVILGMSVLFAVILVLSVGAGIYLSFALVYLLEPLVGIVGSYAIVGAVFLLLIAIVILFKKKLILVPITRFISKVLLDNEKTPLMKGLNLLFAFLGGAAVGAAAGILFAPEKGVDTRARICKLLHDKGIQLKKEDMEHLVDQIAEEVKGGKMSEHSIFIKGARVNNLKNIDVEIPRDRFIVITGLSGSGKSSLAFDTLYAEGQRRYVESLSAYARQFLGRMSKPECDYIKGIPPAIAIEQKVNTRNPRSTVGTSTEIYDYMRLLYARIGKTYSPVSGELVKKHQVDDVVHCALGFPDGTRFALLTNLVIPEGRDLKTHLQILQKEGFPRVEVNGRFQAIEDLLTDGELPESNTVRLVIDRMSVSHETDTISRLSDSVETAFFEGGGECIVLVYDGEEIREFSFSKRFEADGITFNEPSELMFNFNNPVGACPTCEGFGKVIGIDEDLVVPNKTLSVYDDAVMCWRGEKMSEWKNDLIRQADSLHFPIHRPYFKLTDREKDILWHGAGDFEGIDGFFAMLEANQYKIQYRVMLARYRGKTICPVCKGSRLKPEAEYVKVGGRSISELVNLPISELKEFFDRLELDEHDALIAKRLLTEIRNRICFLQEVGLSYLTLNRLSSTLSGGESQRINLATSLGSSLVGSLYILDEPSIGLHSRDTGLLIKVLRQLQELGNTVVVVEHDEDIIRAADYIIDIGPLAGRLGGEVVYQGGLSRLPKATRSYTMRYLTGESKIELPANRRKWNQYIEVEGAAQNNLKSIDVKFPLHVMTVVSGVSGSGKSSLVRDVFYRALLRHYGEGGEMPGTYSRLSGDMDRIHSVEFVDQNPIGKSTRSNPATYLKAFDEIRKLFAEQQGAKQMGFSPSYFSFNSEGGRCEECKGEGTITVEMQFMADIVLECESCHGKRYKQDVLDIEYRGKNISDVLDMTINQAIEFFSEVNGSQEKRIIKRLKPLQDVGLGYIKLGQSSSTLSGGENQRVKLAFFLSNEKQESTLFIFDEPTTGLHFHDINTLLKSFNQLIERGHTVVIIEHNMDIIKCADHVIDMGPEGGKEGGYVVCTGTPEEIAECSASYTGMFLKEKLRSCFKFIEKMIQRIQSIYLLLTTALMAVFLFLPIAQFDTTDGIYSFTAQGISTVEAMTTPVQDSAAAVTQTSVFTPTWGVFVLGTVIAVLSFITIFLYKNRPTQARICMIDAFFLVTFYIVIFLSGYTFREDLSASNISWTAYIVMPFIALILDILAYKAINKDERLVRSLDRIRMPEKGYLIFPIRPTLLSTAISQIHIWVFTDNFLSLQNGAHKMITTEITKLQYDIYGLLAERRLKDAFGKLALLVNELQDWVSRDKLNEMETSYRYMIQYMLDGVEDPERKSIYDHLVLSAYVLTDRVSDRLAGQVSPSQYYGWKRYASASRTGISLSSQFDVCDNEINDLSLALLLGEQEQDFSKIQSLKHRIEDTAGNLFMDIWTNYPAAEEDYRSLREALFTDRFPDTFVSLLLSAVLLNLLHRFDEQKLLILLDGYRHSSPEIQMRSLCCALIVMYIYRERLPLLKSLRNRLDALCEEPRFKTDVRNIFLQFIKSQETEKITRKMNEELLPEMMKLGPSLYKKIRQEDLMNDINALEENPEWQEMLDKSGITDKLKELTDLQMEGADVFMSTFSHLKSFPFFQSIQNWFLPFNPDHTALSGVLSGKGGDTFKKMISASALLCNSDKYSFCLSLAQVPESQRDLMMGQFSAENAAVQEMEKEELMKKEISRENISNRYIQDLYRFFKLYIRRTEFTDPFAGHINLLHVSVLNPLLSDSDSLRLIGEYYFRRGYYAEALELFERLSAAYHSDSEIYQKIGFCYQKKGDYANALEAFLKAEIISPDNFWTIRRIATCYRNMKKPEMALSYYHRAEKIQPENLSVQMNIGHCYVEQKDYEEALKYYFKVDYLDPEGGKAWRPIAWCSFLVGKKEQAQRYYEKILDDKPVSLDYFNAGHVEFSLGHIRKAIDYYRRSIELDNGDSAKFLSNFKQDAPDLISSGIAASDMPILLDQLMYGITDSLMRRIVCVLFLVGVFSINSVCGETLSEYRENLYDLFIQQKIPQWGAVLSKMSADKSCGTLEGRHEILCGYYGLVGHLVDKKKKDEAQTYLKTALALSENYRKMYPNDARFKALHANLIGLKIALSPMRAATLASGMLSSAREAYKLAPGDSWVSILYGNILFYMPGIFGGDKEEGLECYQRARRGMEKDILTNGHHWLYVQLLVTIGVVYEKSERYEQALAMYKTIMEKYPEYGFVKNTSYPRALKAMQQKQMNDYMQVRFDVEPCSEMATDVLAAVLAEIGYESFVPDERGVTAFVPQGKYDEIRLKEELSQYPIGGVSVAYEATFVAGRDWNEEWEKNYFKPIVVGEECVIHSTFHTDVPQARYDVLIDPKMAFGTGHHETTTLMLQAILASDLTGRSVLDMGCGTAVLGILARMKGAASVVAVDIDEFAVENAIENIRLNHVSGVEVRLGGIEALKQESFDVIFANINRNILLADMHAYVACMKRGSRIFMSGFYVEDIPFIRAEAEHLGLRFVGYAEKNRWVAVECMSDMEEEERHFLFQNKNGFVHLSPAMSRSITGYRNLKSKQGKREILLNLSPCVTMEEEERHFLFQNKNGFVHLSPAMSRSITGYRNLKSKQGKREILPNLSPCVAMKFFQPLSSETVVSSVSPLLYRYATPHNATGHGREEGEIQSISFAKIHVYPHRFNIGGEVVKMKDGKKLVYSGDSLRRFLHRKGLTYKDAAKELGLDKNTIGKAVRGGNMNINVLLSIANHWNFPITDFFIFVNQEECEETYFISPNKYNNNSANDNLLVSEDSKIYKNIKNLSTEELALKASKQQEISLLQNLIRNYQDRIDLLQQELGQYKSEMDDVTKKTIEELVLNFISEMNEWEKFCNNLKKENTQLSWNEKQDMMKQKVASIFIKYCTNKERKMSRPNALSWGSEGSYIYDSKEEKIVDIQESRKNRFIVITQNDNKYLQYVIVKKDNKYLIDSKKRRFLDEDKWYVDYLMHLRGVSYISKQHLAGALINTLIIDNYNVQKTYIKAQLWMMMGNVQRQRGNIVLYKEKRDNREYIRIDYAGNKEIHELLTQDTGIETFGYGSAYITAATFRLPDFYDRYSPHAYIDYSRVYVRHPKPQREYTLPEGYLELLEQKRYSPSTIKTYRAYFSDFMEYHKGRNIDRLKVADINKYILYLVNEKKISVSQQNMRINAIKFYYEQVKGGQRQYYGGITRAKEYKSLPEVLSRNEVSHILSCLSNPKHRCMISLIYSAGLRRSELLNLTPKDIISERMLVRIMGKGRKCRYSLLSEKLLKDLREYFKEYRPQKWLFEGEKPGEQYSASALVKVLKEAASRAGIKHRVHVHMLRHSFATHLLEQGTDLRTIQELLGHNDIKTTSIYLHVTSAHKSSIPNPLDTLDGLMGICGCRITFREFCRRIDAFPVGGMCLPSIFFLVLPFFVCLRKYFSIFFVIKWWSMAESKEKLFDQFPPVSTQEWKEKVVADLKGADFDKKLVWRTNEGFNVNPMYRAEDIANLSTTDSLPGEYPYVRGTRADNNWLVRQDIKVTDVKEANVKALDILKKGVESLGFEIAKDLISVENLETLLHGIDMENVELNFSTCMKSTVKLAETVAAYFKTTPADLQKVSGSIRFNPFKRMLTKGRDFADYADQAVMVIDAVKELPGFRVLAVDAVMLNNAGSFISQELGFALAWGNEWLAALTDKGLSVDEVAKRVKFNFGISSNYFMELAKFRAARMLWAQIVKQYNPACDCACKMKAHAQTSEFNQTIFDAHVNLLRSQTETMSAALAGVDSITTTPFDKAYKEPDDFSERIARNQQLLLKEESHLNRITDPAAGSYYVETLTVSIAEQAWKLFLEVEEKDGFYKAVKEGFVQNQVNASAETRHMNVARRKEILLGTNQYPNFNEVASDKIVNGEACGCGCVKHEGGHHCEPEFPVLNTKRAASDFETLRLATERSGKRPTVFMLTIGNLAMRLARSQFSSNFFACAGYKIVDNLGFETVQAGIDAALDAKADIVVLCSSDDEYAQYAPEAFKILDGRALFVVAGAPACMDELKAQGITEFIHVRSNVLDTLKSFNEKLSIMRPNFKNIDITKDAFAHSAGKVAHEGENWITPELIPVKPVYTKEDLEGLEHLNYVAGLPPFLRGPYSGMYAIRPWTIRQYAGFSTAEESNAFYRRNLASGQKGLSVAFDLPTHRGYDADHERVVGDVGKAGVSICSLEDMKVLFDGIPLNKMSVSMTMNGAVLPILAFYINAGLEQGAKLEEMAGTIQNDILKEFMVRNTYIYPPEFSMRIIADIFEFTSQNMPKFNSISISGYHMQEAGATADIELAYTLADGLEYLRAGINAGMDIDAFAPRLSFFWAIGMNFFMEIAKMRAARMLWAKIVKQFNPKNPKSLALRTHSQTSGWSLTEQDPFNNVGRTCIEAMGAALGHTQSLHTNALDEAIALPTDFSARIARNTQIYIQEETYITKEIDPWAGSYYVEALTNELAHKAWEHIQEIEKLGGMAKAIETGLPKLRIEEAAARTQARIDSGKQTIVGVNKYRLEKEAPIDILEVDNTAVRKEQIERLQDLKAHRDEAAVKAALDAITECVKTKKGNLLDLAVKAAKVRATLGEISDACEVVVGRYKAVIRTISGVYSSETKKDADFVRATELCEKFAKKEGRQPRIMIAKMGQDGHDRGAKVVATGYADCGFDVDMGPLFQTPAEAARQAVENDVHVLGVSSLAAGHKTLVPQVIEELKKLGREDIVVIAGGVIPAQDYDFLYKAGVAAIFGPGTSVAKAACQILEILLDEMKNYLFPFSFLLFSLGIQAEKPQWGIPDTISHYPIGPGAVYTHIEFTQKPIQLHQITLDLNNEYNAVEVYPSNGKTPDASRETTSSQCKSNSYEGHRAFFGVNHDLFHYTGQTTAAGINVRNGEVVSHYGDYGRSVMSISKDKVAEVFPPKYSAKVICPDQTEITIDNVNESAYGIQSYRNCVLFNTYSSLTLTEDGLYVKITPQGEWIINGNSTPCRVEAMEHTPIQPDGKSHILFMRNHASEQFEDKVKVGDVVYIDQRFVNTTFPNSGISVPPAQNVVQALHGWPSVILNGELHDKEYNDFVTPGREFQDYPCTLVGITKDGKRLFIITADKASMVENAYYLVEQGAWNVVNFDGGGSATMVVCDEVVNTPTDGKERAVMDSFQGISLAPVDSTFSFVSFSKPSVQAIPLSVVPLRVLAHNRYGEIIDDDFKDVTYSCEPEELGYVNSRGEFCAGAVSMLGTITARKGDSACKIRVVMGNAGKSVKLCADSLYIDDIREYPIEIETESDGKKYMVNPAIFDWQSVGTDCCDVVDGVVRGVTNGRTVLQGKYGDVEIQLPVIVEIGVGEKVHEHFSDGASFSVTGSSAITDIRFDSSVLPVGWSDGTTLLFDLSTGRAPNIMLDKPIRFFGLPDSISIQVKNWGALINNISYEFSCSTGSWSRIINPDADSDSVYTVSFADLDVTAFPVVLNGMKIYLSTQIKGPNQKISFRDLKAYYPHEAPDGIKEVKCGSDFSISKIDPGVIRIQGISEGEDIVITLSDMNGRLLETFCDKAVDCGVCDIELPFVLPPGVYLVGIQTKSGRVVEKLAWMNKNFISLCAGILLGVSPLFAVPAKPVLVRVAQPDGTVVTVKTVGDEFYHYKSTSDGIPVVRGEDGFYRYAELSATGLVVAGNVIARDSSMRSVSDKAYLTSLSEKKISQKLFSRRNLRKQQLQNNITRRVTQATAGDDVHGLVLLVQFSDKKFSSVGTQQAFDEMMNKEGYDYMGAIGSARDYFISQSGGLFQPTFDVVGPITLDNTMAYYGANDYSGQDVRPDEMVIDACKKAESMVDFTIYDRDNDGFVDLVYVIYAGYGESSDIDGSLEDAIWPHAWYIYQGAQKRVSVDGKYLDAYACSAELLGNSGTTRDGIGTFCHEYSHTLGLPDFYDTSGVTSNYGMGTWSLMDYGCYNGPDSDGDGYSDGSVPVGYTAYEREFCGWITIEELTAPSSVTLENLADSKKAYKIVSSDKDQYFTLENRQQTGWDRYMASAGLMIVKVDYDQSVWDYNTVNNESSRQRMTIMPADNKYSEYNEDGDLYPYNGNTSFTDDSRPAAKTNTGLKLGKPVTNIEQDNGVITFDFMGGTPAVVAPVADVATHVTTTGFTANWSSVENAVSYTLQVDRKQPSAGGEILLSEDFSNCTADETTNIAGTTTFGNAKDGYFQTSGWSGKYLFPNIGKMKLGNSDNGGAVCTPAIDLSSCDGVFTVQFDASMFDGSKEKSVVIKVYVEGDESNAQSTEILSTSKMNTYTMTFTGGTADSKIVLMSTASSGKKRAYLDNIVVYSGEVLPEMASKQAVSDVWPLIVTGITDTSYQLVDLEPGYVYSYKVKAVTAEGEESDYSNVVKVDLSTGICDLPESHNRVYTDNGYIVVECETSQPVEVVNLTGQIVVSASVNGRSLLLVPVRGVYVVRCGTSVTRVVVKMKRSEFLKVMGLTAVGAAFAPSILANGKQTNNVSRIATDIKDLKANVNRPVTFLVLGAGNRGSVYAGYAKKYPDCMKIVGVADKNQFRLKSMAEDHDVPEENRFTDWKEALNKTKFADAVIISLPDNLHYDPCMKALSMGYHILLEKPIAPTEKECTDIRDLAIKKNAIVGVCHVLRYAPYFIALKQIIDSGDIGQLISIQHLEPIQYAHMAHSYVRGNWHNSKETTPIILAKSCHDLDIIRWLVGSPCKSISAYGSLTYFKRKNMPQGATERCLDCPHENECPYSALDIYLKKRKHIYAFDLPKERSLQNEAIRKVIRTTDYGRCVFQMDNDQCDHYVTSMEFENGVTANFSMEAFMAKGGRRTQIMGTKGEIVGDMTTFTVTDFRSGKQRIWDAKVEEVKSYVGHGHGGGDLCLVRDFINAVGNDNRDYLSSPISVSVESHIMGFKAEESRLNDRKVKIMGSDELKAFLTALSGRDMKIRIAEFLQQEDCIAEAMDIAVGESGSEAFRAAWGISAIYETNRLCFLRYKDKFVSDFCRVNHHGVRREYGRIMLSMLKHKEYIPDRHSAENLAEIVCSWSIDPKITISEKVWTFSILKFLSRWIEWGEDMLQQLEALCETDMSPGMRALMRRLRKMKKLWGCILVFAVLLTGCRSASVLSFDVWRPAKVTFPADIVRVTVVNNSAEPNEKEGNKYKDISGKEYTLVVPHDSTTYRLAEYIALELSDAHYFPEITIFYDDSITLPKSLYPLLSENQLSIVRGGADNTAVVSLDKTDMVVNMEDHTLLGSSGETVFVTDLSVATTLNLRVYWPNKIEPSSEMVTDTLYWQSFGYTPDDAHSSLPLTAEFIQEAMRQISARVRELFIPHVDNVNRYIYTSTNPAMDDAYDFWQQKKYKEASYLWEYVYEEQKNETTRAMAAANLAVYNELFDNYKVAIEWVDKSLSLFEKRVDSNASDITALRDYRRQLMERKSDNSLLQKQMMFLGVEFLFVLTPSPCGHSPYILLRSTAGGERVKKHFMQTLDNYNFAGKKAFVRVDFNVPLDENFNITDDTRMVKALPTLKKILADGGSLIIGSHLGRPKKGPEDKFSLRHIVAHLSELLGTEVKFVDECVGDKVKAAVAALKPGEVLLLENLRFHAEEEGKPRGLAEDASDEEKAAAKKAIKASQKEFTKELADLADVYVNDAFGTAHRTHASTALMAEYFSPENKMFGYLMGKEVAAVDKVMKEMVRPFTAIMGGSKVSSKIDIIENLLTKVDNLIIAGGMTYTFTKALGGKIGNSICEDDKLDLALELINKAKANHVNLVLAVDAKIADDFSNDANTDFCDVDKIPDGWEGMDIGPKSEALFADVIKKSKTILWNGPTGVFEFDNFTSGSRAVAEAIVEATKNGAFSLVGGGDSVACVNKFGLADKVSYVSTGGGALLEAIEGKTLPGIAAIQGMNKKQLFENIKRKKSFLCIGLDTDMEKIPSHLKQEEDPIFAFNKAIIDATADLCVAYKPNLAFYESLGMQGWAAFEKTVNYIRENYPDQFIIADAKRGDIGNTSELYARSFFCHLDLDAVTVAPYMGEDSVKPFLGYPDKWVILLGLTSNKGSYDFQLTADSYGERLFEKVIRTAQNWASDEQLMFVVGATQGKLFEDVRRIAPHNFLLVPGVGAQGGSLEEVARYGMNRECGLLVNSSRKIIYAATDEKFAEAAREEALKVQYEMEHLLHAKGLLMSEQTTLLEKLEGLLIRFEEIGTLITDPAVIGDMKRFVKLTKEYRDLEKISEAAKRYKQILNGIEESRRLLETENDPEMRDMAKEELDSCTSQLPQLEEEIKLLLVPADPEDSKNAIVEIRGGTGGDEAAIFAGDLFRMYAKYCETKGWKAEVSSYSEGASGGYKEIIFTVSGDNVYGTLKYESGVHRVQRVPATETQGRVHTSAATVAVLPEAEEFDVEINEGEIKWDTFRSSGAGGQNVNKVESGVRLRYIWKNPNTGVSEEILIECTETRDQPKNKERALSRLRSFIYDKEHQKYIDDIASRRKTMVSTGDRSAKIRTYNYPQGRITDHRINYTIYNLPAFMNGDIQDCIDHLIVAENAERLKESELMGWLGTDLVSKTIVLCRAIFFNPSVKINRAKFLIFAQKQKMKVQVSNTNTPNWRDITVKSQVPTDLKCLEILAKNLWWSWNNEAINLFKSIDKDLWKSVHENPVLFLQRIGYEKLEEITKDKQIMRNIQDVYDKFEKYLQVEKRKDVPSISYFSMEYGLSHVLKIYSGGLGILAGDYLKEASDSNIDMTAVGFLYRYGYFTQTLSMDGQQIANYEAQNFNQLPIEQLTEQDGKPMVLEVPYPGRIVYAHIWRVNVGRIKLYLLDTDLDTNSEWDRPITYQLYGGDWENRMKQEYLLGIGGILMLNKLGIKTDLYHCNEGHAALLNVQRLVDYVQNDHLKFNEALEVVRSSSLYTVHTPVPAGHDYFDESLFGKYMGEFPAKLGIEWKDLMNMGRENPDTNEKFSMSVFACNSCQEVNGVSWLHGKVSQKMFQPIWKGYSPDELHVGYVTNGVHMPTWAASEWKEFYVKTFGPEFMSHQSDPKMWEKIYEVDDEIIWNIRQTLKNKFVKFVKDDFRETWLKNQGDPSRIVSVLEKINPNALLIGFARRFATYKRAHLLFTDLERLSKIVNNPNYPVQFIFSGKAHPADGAGQGLIKRIVEISRMPEFLGKIIFLENYDMKVAKRLISGVDIWLNTPTRPLEASGTSGEKAEMNGVLNFSVLDGWWYEGYKEGAGWALTDKRTFQDQNQQDQLDAATIYSMLENQIVPLYFAKNSKGYSPEWIQYIKNSIAKIAPEFTMERMLHDYIDRFYLKEGKRTRLLKADQFAKAKEIAAWKEEFVSKWNDIEICSVSIPDGLLYNPHVGEEYEMSVVLDNKGLGNCLGVELVIANVEEGNTEPYKTLEMEPVQTDGTKVTYKIQYQLNDSGVFRYSFRMYPKNPDLPHRQDLAYVRWFMEKQLIPDYIFEVSWEVCNKVGGIYTVLSTKARTLQKLYKDRIIFIGPDIWGDKPCPYFIRSKTLLKDWHKQASLPQNMKVKIGRWDIPGRPIVILVDFKSLYPYKNDLYGEMWNRYGVNSLPAYGDYDESCIFSYASAVVIESFYKFIQGEKFKVVAHFDEWTTGMGLLHVKYTLPQIATLFTTHATSIGRSIAGNGKPLYDYLAGYNGDQMAEELNMVSKHSLEKSAAHEADCFTTVSDITAKECSQLLERTPDIVTPNGFERDFVPAEESYSTKRNLSRKRLCDIVEALTGERPKKNAFLIATSGRYEYKNKGIDLFIDAVKRVSKSPDLEREIVAFILVPAWVEGPRIDLQNRLQSATYEATPLPAPFITHTLHNYDQDSVVNQIHYLNLDNEAGSRLKVIFLPSYLTGKDGIANLSYYDLLIGLDATAFPSYYEPWGYTPLESIAFGIPTITTDLSGFGQWINSRKEQGLEKSGVKVLHRGDLNFVEVSEDLADSILALSHCGKAQRAKIGQAATNVSLEAEWKHFIEYYTQAFHLALKKAALRKMANKRTLKKEINYVAGELLSECLCNKYLIPGTDAEKVDALMGKIIGIQDDFLCRVGANGDKDPKKVKVYYRKLRADFDKAIDEIFEDLASLNAMKRAISSFILRLFGWTVEVDVPDYPKCVICVAPHTSNWDFFIGKLAYLSIGRYAGFMMKKEWFFPPLGSLLTSMGGVPVSRDRHTDMVSQLVEIFKSRKRFSIAITPEATRKANADWKKGFYYIARDAEVPIVLAYIDYKDKEVGIKKVFMPTGDVEKDMRMIKSYYKSFHARRPENFVTGLMGDVLRVSLIQTDIVWEDKRANLDKYAAILSHITGDCDLVVFPEMFTTGFSMRVEDLAECIDGETITEVKKWSRNYNVAIAGSFIARAGNVCFNRGFFIEPDGSEHYYDKRHLFRMGEEGRHFVSGSEKLIVNYRGWNICLLVCYDLRFPVWCRNVGNEYDLLLFVANWPQSRSYAWRNLLIARAIENAAYVCGVNRIGQDETSMVYRGDTMAIGVKGEVIAESEPFVPQVVNVELDLSKLKSFREKFPVWKDADEFVLKKMKNPRYLILVFCGLLLLSCTGNKYIVERTPKHNNPVDEISWLKKRKKEFEKRECQITLYEKDGKNYYAVFATTPGAFDKNTTVVYDQEGNVCLKFGGLMPPPKREAVKKFFENAENKGTIWECKQRHKKEMSKISLIIEREYLTRVQKKSFILMTILSPIVMVALIFAPIWLAQLSSDEVRQIAIIDQTGLYKNIYENSEEYQFTYTQGILNPAEMRAEESQPYAYVIIKDNLLNNPKGMTIYSQKQITNSCESMITSQMEEFLKNEKLLSYNIPNIKQIIDDSDINLHVDTIRLEEDGAETQTSSEMVMVIGMAMTLIIYMFLMLYGGQVMSSVMQEKTNRIVEVMVSSVKPFELMIGKITSIGLVGLTQLGIWILFIIGIFLSAGAIFSFSGGMDTANIENMTAVAGSMNGVDAAQLTGKMGAMQEIQNMLGSINLTQLLICFVLFFIGGYILYASLFAAIGSAVDNESDTQQFMVPITFIIIFALYAGIFSAENPDGPLAMWCSMIPFTSPIVMMVRIPFGVSTWELIVSMIILYGSAIGLAWVAGRIYRVGILMYGKKPSYKEMIKWIRYKAMYYLEANHIVKQYASHRALDNVTVHVPENGIYGLLGPNGAGKTTLIRIINQITAPDEGEVLIKGRPLHPSDVEHIGYLPEERGLYKKMKVGEQILYLAQLKGLSKNDAKEGMKYWLNKFDIKGWEKKKIEELSKGMQQKIQFITTVMHNPKLLIFDEPFSGFDPVNANLLKQEILEMRDKGATIIFSTHNMGSVEELCDEISLINRSHVVLQGEINNIREQHKKHLFKIEVQQGNLQSNDLYEILETKERHANFTYTLRKRNTQMSNNELISLLTQQCQLSGFEEILPTMNEIFIETVGESALKENTNIKMKNINRPNYYRKEITIFVEKKKKGMIDQATIDRIMAATDIVEVVSDFVSLRKRGANYWGLCPFHDDKTPSFSVSQSKGVCKCFSCGKGGSAIHFIMEHEQLSYYEALKYLAKKYNIEIHEKELTDEEKQKRSDRESMFIINAFAQNFFSKSLLETEEGRTVGLAYFRERGFNEDIIRKFGLGYSPEKRDALAQEANKQGYKTDYLLKTGLCREGQNNRIYDLFAGRVMFPVYSVSGKVVAFGGRILKSGVKISKYFNSPESDIYHKSNELYGIFQAKRAIEKEKCCYLVEGYTDVLSMHQSGIENVVASSGTALTPGQIRLIHRFTENITVLYDGDAPGIKASLRGIDLILQEGLNIKVVLLPDGEDPDSFSKSQSAESFTQYIKSHETDFIRFKTQLLLEDAGEDPIKRAGIISNIVQSISLIPDTIVRSVYVQECSRLLQIDEHVLLFELNKMRQQRAEQQFTRDRYQSPQSQTVRPSVIQDSFGNNVSVNQVSDAEVVPPASSEIPETDKNISLPTPLSSKRGNRSPLDKYERELIRYVVRYGYRDLFETATGTWQKVWEYIVEELAIDNIVFNNPLYKHILELASQQREHVVQQVSSLRQELLPKAQDQINEIIEQIRLENGDITDKQRKEAEARENITRQMEEELQTFESNFLERYFTTYPDTQISLLAVDLVSDKYQLSKVHTKYQKVETESDRLWELIPRAIYELKNAILEQTIKQIQKKIKEATQNKDNEKIIELMEQNVELNQLRTTLAKQIGDRIISPKMKNTLQMYEFSNTTASFSIEKIQIITLFSYLINIFSKIHSIKNILFLMAFAALSVSAGLARSPFVLSDAVPAECMSMEKVDMPMMNRAISKPASALKFDFVKENRKHLMKKDAQIAALTAPEALPATNVSDVGFVANWNTVSGANYYSVQTYRHFTTTQDVDYISLYEDFYFAEAAPEEFTNYLDGYTYRRNWILLYGKIGDQSIIFPQTSSKGQTELQTREMDLSGEGENETVYFGITAEGAVGDKIGIGYYYIDADGNDQSMSLGTIPFEESTLDAMYEVEVPSSESAGFYLYTVGAMQNTGDVKLKTFLVSRDLTAGTEFMEVYDYRRTPETSATFFTIEKDIETEGVVDEFAYAVIALDVNMQTGNVNDNSDPSEIIFVGESSAVEGLKASREKIFIHDKLHVVLDKPETVSVYNMAGVLVASYEGGEGDNEFSLSASGVYIVKAGNTIAKVMKMNSDVIIIGAGPGGYETAVYAAKKGLSVTLFEQRKAGGTCLHEGCIPTKCLCRSAEIADTIADCDTWGFHVSAPTIDFQRIMERKNEVVAQLTLGIEFLLKHKLITYIPERAELFDAHTVISESGEKYTAEHILIATGSTAKRPPIEGCDLPGVLTSTEMLDIDHIPQKLCIIGAGVIGLEFASIFRSFGSTVTMLEYAKEILPNFDSDISKRLKQVLSKRGIEFYNQAAVESIKRSGAQLLVHYTHKGKECSTEADIVLIAVGRSPRVESIGLDNAGIRYSPKGIETDDTLRTNIPGIYAIGDVNGHCMLAHAASFQGRKVIDHILGIDKRIKLDTIPAAVFTRPEAGMVGLTEEECKQRGIPFTAKKTLFRANGKAISMGEPDGLCKLITDENGKIIGAHIFGAHAADLVQEISALMNRETTVEQLKEMIHAHPTLSEILQECAREFMKYYDKLIFEISKPGRIGYSLQQSDFGNYSLADLPQSLRRETEAKLPEASELDVVRHYTNVSNKNFGVETGFYPLGSCTMKYNPKINEEMASMESFTTLHPLQSENSIQGALRLYYELAHALSEISGLAEFTLNPFAGAHGELTGLMLMRQYHIKRGDLKRTKVIVPDSAHGTNPASAAVCGLEIVEVPSTPEGTIDVTKLEPLLDDTIAGIMMTNPNTLGIFEKEIPKIAELVHGCGGLLYYDGANLNPLLGRCRPGDMGFDIMHINLHKTFSTPHGGGGPGSGPVGVAPALVDYLPSPRIVKKGDKYSIEGGSDSMGRISGFFGNFGVMMRAYAYILSLGKEQIKHVGELATLNANYVKESLKDCYYLPIEGICKHEFVFDGLLDKSTGVTTLDIAKRLLDYGYHAPTIYFPLLFHQSIMIEPTETESKETLDEFIEVMRTVAHEAIENPDLVKSAPHSTPVRRLDETTAAKNPILRFKDLQKQSMYKYFPHTEADISEMLGKIGLSSLDELYAEIPENIRFDKDYDLKKSMSEDEVRNYFRELGKTNKKLIPFAGGGAYDHYAPAVIGQLISRSEYLTAYTPYQPEISQGTLQYIFEFQSMICELTGMECCNASMYDGATAAAEAMLMSIAHAKKRNKVIVSQTLNPRVIEVIETYARFHGVNLEMIPEKEGVTDKAVMEKLLEADDVAGVIASTPNRYGIIEDFSGFADNAHAHKALFIVYADPSAMAVLKTPGEWGADIACGDGQTLGMPLNFGGPYVGYLAATRDLVRKLPGRIVGATTDVDGKRAFVLTLQAREQHIRRQKANSNICSNQSLMALYVTIYMALMGKQGMKEVNEKSYAGAHYLCDKLLETGKFSLCFDKPFLKEFAVKTTLNRDTLLKHLEEKGFLAGIPVKGTDDALLFCVTEKRTREEIDNLVSLIEKEGMSTVLDGLYYSESHEWLKVEGEFGYIGITDYAQHQLGNVVYVDLPEVDDELNQGEEFGAVESVKAASDLLSPISGIVVEINDKLEDEPELLNEDAFGNWICKVKINDKSELDSLMNAEAYKAICEMEDILKTCLHQKHLDLGAKMMPFGGFDMPIEYTTIIEEHNAVRHAAGIFDVSHMGEILITGPDSERYINHIFTNDIRNAEIGKIFYGMMLYPEGGTVDDLLVYKMGEERFFLVVNASNIAKDFQWIVEHSTGYDLKIENLSDYYGEVAVQGPHAEACIEKLLNLDVKDLLFYTCKEMKYENETIIVSRTGYTGEDGFELYGSHDFINRVWDILVDSKQVLPCGLGCRDTLRFEVGLPLYGHELEKDITPIEAGLGMFVKLDKEEFIGKEAIILQKAEGIKRKIVGIELADKAIPRSGYEVYADGKVIGHVTTGYNSISTGKSVCMALIDSAHAALGTEVEIHIRKKFFKGTVVKKRFYEKNYKKMKYIALPDKAVRRLSFYLAMEEYIAHNRPGEDCFFMWQVNPTVIFGRNQLMENEINFDYVRSHGIEYYRRKSGGGCVYADFSNIMFSYITDDFNVSFTFDRYLQLIAHTLNKLGVKAVASGRNDITVDGKKVSGNAFYRTSGRSIVHGTMLFDTNLEDLVLSITPNNEKLITKGIESVRKRVTNLKEYLDIDIEEFKRFIRSSLCDHEECLTQKDIVHIEKIETEYLRDEWILGNNPRYTWIRKGYVPAGEIEIRLEIKNGIIKSMNLVGDYFLVGEIDEFLNKFQNVPFTPQSVNRILDDNPIENYIRQLSRKSFIDILFNNNMGNTLTRNFLEFYFRDEESFYLCIKAKSNKLEVKMKEDLKYKGVDFSDIESDREFYGCTFEECSFAQAKLTNVLFSRCEFIRCDFSLCKIYGVSFQDVRFVGCKMLGVDFTGCKGLLSSFDFEKCLLQFSSFIGMKLKSCNFIDCNLEEADFTECNLAEANFDCAVLNRTVFFHTNLEQADFSTAIGYEIDPRHNSLRKARFSLAGVIGLLRPFGIVVDMREWKVTNGYKVKADELSWEELKNTTENVIEEKRKSHRIVVLDGYGLNPGDLSWEGIERMGEFTVYDRTSVDEIVSRAALADIVLTNKTPLSATTLEQLPHLRYIGVLATGYNIVDVEAAKNRGIAVTNIPAYSSESVAQMVFAHLLNIASDVAAHSQCVKSGEWADGKDFTFQKSPIFEIAGKNIGIIGFGNIGSTVARIAHAFGMNVLAQTSKKKDQLPDYVTPVTLETLLAESDVITLHCPLTDTTRNLINARTIGLMKPSAIVINTGRGPLVNEQDLADALNEGRIKAAGVDVLSQEPPRKDNPLIHARNCFITPHIAWATFEARERLMKIATDNIRQYLEGHTVNQVNIMSIFNHTPKNNYMICENDENTPSIMPLFTEISGQNDSECKTLNTKGLPILALRNMVLFPGVAIPVNVGRTKSLQLIKDAQNSHTPIGVVCQRDAAVEDPGKDDLYEVGVIGEIIKILEMPDESTTVILQGKMKRFRIDEITETFPYMRANVSLENEILPDANDKEFEALVSALKDLTFELLKNIGEQAKELVFAIRNIDSAHYLVNFLGANIPLSATQKQELLTISNIKERLFKLYEMLTQEAQLLQIKADIQSKTREDLNQQQREHFLQQQIRTIQEELGGNMQDQDIQELRERAEKKKWDSKTAEIFEKEMRKLERLHPQSPDFSVQYTYLDTLLELPWNEYTQDNFNLNHVQKQLDKDHYGLDKVKERIIEHLAVLKLRGDMKSPIICLYGPPGVGKTSLGKSVAEALNRKYIRISLGGLHDEAEIRGHRRTYIGAMPGRIIQGLIKAKSSNPVFVLDEIDKIGNDFKGDPASALLEVLDPEQNNAFHDNYIDIDYDLSKILFIATANNLNTISQPLLDRMELIDISGYIIEEKVEIGRRHLVPKQLENHGLKEGDVVIPKKVMAAIVDQYTRESGVRELDKKIARIMRKVARLKASGKEYNPTLSIDDLHEYLGAQEYNRDKYENNDYAGVVTGLAWTAVGGEILFVESSLSKSKGEKLTLTGNLGDVMKESAVIALQYIKSHASLLGIDEDIFDKWAVHIHVPEGAIPKDGPSAGITMVTSLASTFTQRKVKDHLAMTGEITLRGKVLPVGGIKEKILAAKRAGIREIILSEENRKDIEEIKESYLKGLTFHYVKNITDVLKIALTDEKVKNAIDIKMALSKLLCFFVYFAGQMSDGMANSFFKFKQFTIHQERSAMRVSTDGVLLGAWSRVEKSNRILDIGTGTGLIAIMAAQRSLARIDAVELDFGAASEAAFNVSLSPWKDRITVYCMDFCRFYDKTTKPVYHHILSNPPYFIDSLLPPDGKRERARHTGTLDYEVLFEGASYLLLPDGKLSLVSPADLQEHLIFIASLYGFYPVRFTYVSGILGKAPKRLLSEWSRARRPLEENAFSIEKRGEGYTLEYIMLTRDFYLKMMDIATMHFWGKTKYWWALIITGILMIPCGLWLWFQPALGYEVLSLLLGWLLILFGIVQLIVSGNVKQKVRGWGWWLAGGIIDILIGFILVGNLSFSEAVLPFFFAFIFVYKGIANLFSALNMVSTHRYWWLYLVNGLLLLILGLLFFASPFTAAFSIIFLCAAAFIYWGFSLIFFGYSLRPVEQMKTKKFALLIILSMLVTGFAGADSYIVEDDIYYNPNDKNPVVEKKEKEAQKELQEKAAVKKTLMATSDNHFRDVDEYNRRGESSDMTLEDIAANQKEDYVEYNVVDENGDDGYYLNGFNGSDSDYEYALRIRRFHNPKFVVSVSDPFYSDIYFLDNNDWNVYISDNYAWVTPTWTNPWYWNYTWAPYSYTSWSWRWSLGPWGFSFGYDPFYSWGGYWGWNSWYRPPFYHHHHHHYYDRPYYGWNRPYRPQYTPNGRTPNRYGGSAISSGNSAASSRRRATVGTGTSGNTTGRRTVGNVTSTSGGHGSQSVNGVRTNRGTVISNSSNSNGNRGYSFGEANSSRRGNSSFSGTVSNPSSSQSRRQTTINNNTNSSRRNYNSIGNGGRGSSSYNRSTPSSNRNSGYSNSSSSSRRSSGSYSAPSHSSSSRGSGTSSRGSSSSGRGGRRMKNVRYGLALAALCSSSMLFSQGVVDALKYSQQDIRGTARYMGMAGAFGALGGDITTLSQNPAGIGVYRNSDIAATIDLSNQVSSVNTAGNRMSDSKFNVSCNNFGFVWTVRFNQEALKNLNFGFAYNKQKSFDRSYKAGYSGITGASSLSGYIAHLSEGYSVADLAYPDNSGSSYDPYNNNPWLNVLGYQSYLINPKSTTGNTWNSIVGNGTNTTGDLYVREKGSIDEYNFNVGGNIYNVFYWGLGIAVTDFSYDIQSGYGENFTGGYISSGSPSVDGWYLMRNALHTNGSGIKVNLGVIMRATDNFRLGFAFHTPNYYKMTDSYVASVKYDFNESGTRYDDLAETPSGSYDYEFQSPWRMIASAAYVFGQSGILSFDYEYTSSNNMSFDDPYSVDAFYKTNQEITEMVSPMHTFKIGGEFRITPQISARLGYAYQTSPVKSEYRSGREIPTAGTLTMFTLDRETNYFTVGLGYRFSNVYVDMAYMHRYRRSELFPFSPLPAAVDNPYNPDQTEPSLAISPQISSLTDHNNSFVLTLGVKFMEENFVIDTGNKEFQDALSLIQYTSQSVFLTGKAGTGKSTFLKYVCEHTKKKYVVLAPTGVSAINVGGSTIHSFFKMPFRPMLPDDPDLSLAGGRIYELLKYNKKQRQLLREVELIIIDEISMVRADMIDFIDRVLRVYSGNMRFPFGGKQLLLVGDVYQLEPVVTSDMRDILSRFYSNFYFFSARVFREMSLVPIELQKVYRQQDERFVEVLDKIRNNTATREELDLLNSRYLPQYEPEKDNFSITLATRRDQVDYINENRLSGLPGKEYTFTGTIKGDFPEGSLPTSLELVVKIGAQVIFIKNDPERRWVNGTIGMISDITPDEKIEVVLESGEMYELERCVWENIKYTYNEKEKTIEESVLGTFLQFPIRLAWAITVHKSQGLTFNRVIVDFTGGAFAGGQTYVALSRCRSLEGIVLKRQITHRDIFVNPDIVRFSKGFNDSVLIEQSLKLAQADRLYVEAVNAFDEGDFDKMLQSFFKAIHTRYDIEKPVIQRYIRKKLNVINQLRVKNRELQQALSDRNTVLRKYAHEYYLLGNECITKAKDVRAALANFDKALSLDPTLIDAWVRKGITLEDQGDEHGAMACYNEAVRLSPLSFKALYNRGKLRYKQGDYETALSDFAKAVKQKPLHATAHDRLGDTFIKLEMPDMAARHWAIAEELREKKQQNNKMNKGLKKGLKITGVTVAVILVFMLVLPFVFKDKVITIVKKEANEMLNAKLDFESLDISLFSHFPSASIELNGLTLSGIDDFENDTLVSAESIDVAVNVMSLFSDKGFDVNYVVLDKPSIKAVKLADGRVNWDIMKPDTVDVEEEKTVEVEGESSFRLKLKNFKIVDATIVYVDDSTNMQFYTDKLNLKLSGDMSADMTDIDSKLSCKDIYFAMGGISYLKQAEAGAKLTVSADLKNNKFILKENTLSLNAIVLNLDGWVALLDDGAMDMDLKINTSEINFKEILSLIPAIYQNNFDKLRTTGNMSLTAFAKGRMAGENMPQFGLTLGVKDATLNYEGMPASVDGINIGASVSNPGGSLDKTIIDLSEFRLSMAGNPFKAALYASTPISDLNFKATADGTVHLGKIKDIYPLGDSITLSGIVTADLQFAGRMSDIEKENYQNIRGEGTLTVADMDLTMKGLPAVAVKKAQASVSAKAMSLSQLDVKVGKSDIQAHGSLSNYLAYVLKNETIKGSLTVTSSLLDLNELMGDSETSGEETVEADTTTLSVIEVPKNIDMTLSADFKKILFQKMELDNVTGKLIVADGAVRMTPLSLNAFGGAMVANGIYSTAESVVRPMVNFDLDIQKASFEKTFEQLDMIQKIVPIFAKTGGTYSVKVDLKSALDSQMSPDLSSLTADGVIQSNDIQLQNIEVFSQLATLLKNDKLKNIEAKDLKISFTIKDGKVKTSPFDMKLGNITMNLSGVTGLDQTIDYRAKINIPGAGALSNVSATIGGTFSKPSIKLNTDEVVKNAVTEVLGVDAEDIEAQKAAIRKQAEEAGNKLIATAKSESEKLISKASNPLAKVAAQAAGKKLVEEAEKQAQKLKNEAEKLIEKQYGGSEMWKEEEKPFVNSKYCSKVREHYPITPIRYALTSLLIILVADKRKEGENRYKFLLRIGDSMPDSVAEPGVEQMDTLVVESKGEPEINSLFQLGSNVPTHLNVAAPAKKRPWLAGAEVVAEDLLFHVLTRYLIKEDYAQISWSSIKNNFKTGLLWDNDKFETNLFSHPYQGNLYYSSARSNGLNFWESAPYALLGSSIWEWFMETQPASINDIMSTTFGGMALGETTYRLSSLVLNGQARGWERASHELVAAFLNPVRAVNRLMTGEAWRIGPRYVDKEATIPFHFRFEAGYRMLDNIREGKNKSIHVGCMNFSLIYNDPFEIEGNVPFEHFTARMLFNMFAHQPIIGDVNICASIWGREHDYKNGNELFAGIFQNYSYYNSGRMDNESNEVPFRISETVSYGPGVLYRMKLHENNTLALNGFVSGVALGGALCDYYQFHDRDYNMGSGYSIRLNGLFTLQRRFGIYLGFENYHIFTWKGYEHKDYENMNPHYLDAQGAVGDARLQMMNLRGSFAISPKVGISAETAWCRRKSHYKYFPDVLSDTFEFRLMFSYHIMQAIGFSIANIIQTIYRPSDQTVNNKSNQCGAQTSPVTQLPAKKYRKKNKYIFKPLLRPSEMGAGYGIMALLLVLAIALTFVYDSTVRHVLLINVGIYFILNIAYCFWLKHIALVDVFVISIGFVLRVLAGGVVTGIWISPWIILMTFLLALFLSFAKRRDDVLIYERTGDKMRLNIARYNLEFINMAITLVGVIVVVCYIMYTVSPEVIERMGTSNLYLTTIWVLAGILRYLQLTVVDKNSGSPTKILIHDRFIHVCIVGWVLSFGVLIYFMRIAIFDFDGTVTTKDTLLEFIKFVRGPVSFYAGFLRYAPQLLAYKLGLYPNWKVKQQIFSHFFKGMRLEDFNWLCEEFFQKEGKALVRQSARIAIWEQLQKCNRVFIVSASIYNWIKPFASDLGIRDILSTEIEVDGEGCLTGFFSNKNCYGQEKVVRLLEQIPDLENNYLIVYGDSKGDSQLLKYANESHYRALMDKSKVFFTNLHTTPSSNLLDKMERLIKRAGIESIDFKDQFVAIKIHFGEPGNLAYLRPNYAARLATLLRSWGAKPFLTDCNTLYSGRRANAVDHLQSAMENGYNPISAQCQVIIADGLKGTEYREIPLNGEYCKAPKIGSALADADIVISMTHFKGHEQAGFSGALKNLGMGGASVGGKLELHCNSQPKIETENCKGCNICVKHCAHDAIHLNQNHKAEIDYTKCVGCGQCVALCQHDAAVMGECDTSERLNYKIAEYTQAILKDKPHFHISFIMNVSPECDCWNHNDAAIIPDLGILASFDPVALDKACADMVIAAPAINGSCLTEKHPHEHLEGADKFHLMHPDTNWQAGLEHAQKIGLGVMQYELITVMIVLLSFILFDMNKINYIINKIEICLSFYHDCIIFVSMKQLRLIILFSILSLSVTVRAMKEQSVSLDTPTGKINGKIGLPDAEKPPIVLLIAGSGPTDMDGNTNSGGFSMKNNSLKLLAEGLAQRGIATLRFDKRGIASSSAATKKERDLRFEDYVTDVQGWIDRLSEDSRFSDVFVLGHSEGSLIGMLASVDNPKVKGFISLAGAGRPAYDIIEEQLSGQPAEVRHLVKSINDSLKAGKEVSNIPMGLMALFRPSVQPYLISWYRYNPQEVIAKLRQPVLIIQGDKDVQVSEEDAKLLEQSLPKAQFQILKDMNHVLKTCESVDMQVQQATYANPDLPVQEDLLITIEKFVKRMTTSVTRKKLPLRCPACDAPLRVSKMICGRCATEVSGEFELPVLTSLNEEEQRFMLEFVKASGSLKDMAKKMGVSYPTVRNYLDDLIEKLNNMEENERMKDSWKFISNPFYKVAGYKAAGWGILGIVITTAIAYGADVHFHGLLHYGGAPHSEWWCFVVEHLVIWLIPSLLVYILSLFCSRSHIRPIDVLGTVAFSQLPFVLLALCMAFPPVRHFMSIQSLQAIEDALSDKMFLFSAIWIGALSLLIAIWVLYWIFRAISVSCNLRGRNLWIVFIVGTFGGDILCRYLIGLCYMKRTIYILLLAVFGILSATAENNFIEKFANQKGVTYVNISKALLNMMPEGQIDAEGLNLKAVINELDRIQILTCEDNEALIPQMRKESIVFQKAPYEELMKVKDDGETVAFYVQPKTDKKIKELIMLVDDGDCGEFTVIRLLGDISITHLQELTKDAGLMNEQELRQQIDMFFKGDLSDTEEQGLRDYLATHEVPEDFIQEKRIILSLIPDRSVHIPDHLEEKLSSYIDRLPDKKRQVLFSRNWKWISGIAAGIILAISTGLYMYRQPSSKRLSNQEIYACAEAQRALILVSQKLNKGTNQWQQAQKEIIETNRIVNKHLKYKMTHQEFKARFLPCHKKMYYIAFRYLGNEYDAEDMVQNTYLKLWEKRESLENIENNEAYAITTIKHLCLDTLRAPQIETDNDSVLVQKTEPAPQPDTAYEIKEDMKVLLNIINKLPEQQRKILLLRHFEDKSTDEIETETGLSNANIRVLLSRARKTIKELFIQRLMKSRIFLLIIVLLSTLQILFANNKIDNLFKKTKELPNAEYYTEDFKKPQVKGVVDGVKAIEVVEADIDNATYLALKKEIEEVDFKPYETILTTSEDDEFVKILIKSTPKKIKEVVVISLYSDEINVVRCKGNLKSDMLEKSKTNMKTKILILALAAFCSFSSISAGNCIDNLFNTASRMPNAEKVNLNSFVLGLLKPFSSELKGIKSMSIIDAENISSKDYTRFEKIITQCDSDGYETVTSSNEENEIVRILMKIEKEKIREIVIISLEENEISLIRIKGKIDPNQMQNIIEDNAMKEEIIIAGFGGQGVLSMGKILAYSGLMEDKEVTWMPSYGPEQRGGTANVTVILSDERISSPVLNAFDVAVILNQPSLEKFESKVKPGGILIYDGYGIHHPPTRTDINVYCINAMEAAIEMNNTKAFNMIVLGGLLKLRPMVSMENVLKGLKKSLPERHHHLIPMNEQAILKGMEIIRKVMDINEIIKPENLVYTKPRLMNDNPMHYCPGCSHGVVHKLIAEVIDEMGIEEETIGIAPVGCAVFAYNYLDIDWIEAAHGRAPAIASAVKRLNPKKMVFTYQGDGDLAAIGTAETIHACNRGENIAIIFINNGIYGMTGGQMAPTTLEGMVTSTCPYGRNVALNGYPLRIAELVERVDGTCYVTRQSVHTPASIRKAKKAIRLAFENAMAGKGTSLVEVVSTCNSGWKMSPAKANKWMEENMFAKYPMGDLKNVMKEDIKLMKGNEAIAHAAIRYGADGYFGYPITPQSEVMETLMEEKPWETTGMVVLQAESEVAAINMVYGGASCGKAVMTSSSSPGVSLKQEGISYLAGAELPCLIVNVMRGGPGLGTIQPSQADYFQAVKGGGHGDYHLIALAPASVQEMADFVALGFDLAFKYRNPAIILADGIIGQMMEKVVLPPFRKRRTEEEIREQNPWATLGKTKNRKRNVITSLELDPAIMEQNNIRFQSTYKRISENEVRFEEINCENADYLIVAFGSMSRICQKTIELAAEEGIKIGLLRPITLWPFPTEAIARHANHVKGILSAELNAGQMVEDVRLAVNGKVRVEHFGRLGGIVPTPDEVLNALKEKLMMANIKGAVVVNKERCKGCELCVVACPCQVLALQPTEVNDKGYHYAFMQNPDACIGCASCGLVCPDGCITVYKVKLMLTYISIFVTAIFVNNIVLSQFLGICPFLGVSKRIDSALGMGAAVTFVMTIATIVTYLLQTYLLMPMKLDYMQTIVFILVIAALVQLLEIIIKKIAPSLYQTLGVFLPLITTNCTILGVALIVIQKNLSLLEATVYAISTAIGFTLALVIFAGMREQMSLSHIPKAMQGTPIALIAAGLLAMAFMGFSGIKIGMSKTKILLNGIIKENPTFVLLLGMCPTLGTTTSAIGGLGMGLSTLFVLICSNVAISMVKNFIPDKVRIPAFIVIIATFVTILQLCMQAYLPDLYETLGLFIPLIVVNCILLGRAEAFAAKHNPVDSFFDGLGIGLGFTFALTLLGCIREFLGTGHVFGISVYPEEYGSLIFILAPGAFIALGFLIAIIHTLKTRMKKKDSTFWNMLWSLTLITAVAGGLLGYTHRLTQEPIARATKAGREKAIQQVIPKYDNSPIDEQCSYTVRNEYGETTAIVYPAKKEGVLVGAAVECSNSTGYGGEIRIIVGFEADGTIRDYRVLKHQETPGLGAKMDEWFRTEKNNQNIIGKSPIRNKLQVKQDSGDIDAITAATITSRAFLAAIQTAYTAYIESMKGGNHEMELTVSPAPHIHDNLTVSKCMYNVIIALLPAFAVSLYFFGIGALIVTLSSILSCVIVEYLIQKYLLKEKPSIGNGSAILTGLLLAFNLPSNLPIWIVVIGSIVAIGIAKMSFGGLGNNLFNPALAGRVFLLISFPTQMTQWPRPIVSRWNYTDTETGATLLSKLKEEGSQWIEQIDIANLWIGNQGGSLGEVGAIALLIGFAYLLYRKIISWHIPVSILLTVFLFSFVLACGQETGNMQNIPMWQYAFDFALIQLLSGGLLLGAIYMATDYVTSPMTSKGMIIYGIGIGILTVVIRQWGGYPEGVSFAILIMNAFTPLINNYIKPKRFGNHRSMLKTFRIGGIHPKENKLTSQCPVTAIPVPRQVSLMLNQHIGAPANCIVKKGDTVKVGTLIAEANGFVSSNIHSPVSGTVSKIDKIANAFGIYSQAIIIDTEGDDWEEYIDRTPSLEKEIALSSNEIIQKIAQNGIVGLGGATFPTHVKLTPPKEFKPTVLIVNATECEPYLTDDHALMLESPEQIIIGCHILMKAIHVKQAYIGVENNKRDAIALLKKQAEKYPGIEIVPLRTRYPQGGEKQLIDAILHKQVANGALPVSTGAIVQNVGTAFAVYEAVQKNKPLVERIVTVTGDGVKQPGNYRIRLGMPIRELIEIAGGLPSDSAKVILGGPMMGKAVSNLDAPIPKGCSGILILNEAHAHRSETSSCIRCGKCVSACPMGLEPYLLAKLSENHLFERAEKELITACLECGCCAYSCPSNRPILDYIRIGKNAVNQIIRSRKQSMVTAIIILSIIGLISATLLYIISRKFHVEEDSRIDEIESILPGANCGGCGYAGCRNFAEQCTKATSLDSLLCPVGGNEVMQKIAPILGLNAVEKAPRIAVIRCNGSCENRPQTSHYEGAHSCAVVSSLYTGESNCNYGCLGEGDCAAACEFGGITMDPVTRLPRIDSNICVACGSCVKACPRHLIELRKKQESMIYVACNNKDKGIIARKVCSVACIGCGKCVKTCPEKAISLSDNLAYIDDNLCLSCQACVDGCPTHAIHTEIRNNIRETSTPRKETAICMKRPDIEHEGIITGISKSHIFVRIIQHSACAGCHAASLCTTTDQKEKIIEVEKCDFPIQIGDKVSVALSTSAGYRAIWFTAALPVILIMLSLVINERIGVNELYSGVCALVVLAIYYTILYFYRDRLKKRFRFFLKPIHVSMKFKRHIFIYAALLIIVVGTMIWLRPRNTYRPRTFEEIKADGVLRIVTDYTPLSYYLQGDSLSGFDYELARMVGNRSGLSIEITPEVNLSKSIDGLKKGQYDIIARQLPVTSEIKEELAFTIPIQLNKQVLVQRKDPKAKKKLIRNQLDLAGKTLYIVSDAPTRLRIHNLSREIGDTIYIQEEKTYGAEQLIMMVATGEIDLAVCDKAIAQQMSKDYPQIDCNTDISFTQFQSWALRKDDSILLDSLNKWISEIQKEDKYKKLYNSYFMRKACIIILSVLFCSLFSEAKKKQDIPAPYAWSITQPLGSRYDVPMDTLMHNFYSTDIPSSYSTAYGTTGNLGAAAFSKIFFDRPLPSEFIFKDPFGHWIQTASSWKFYNSHIPYTQLSYLTGGSKQTAQDDLKAVFSGNFNQKLEFGGSINYILSRGHYQHQATKDLAYSIFGSYLGDRYDIQFFLNTYNFVNQENGGISDDTYILRPEEVQGGQSSVNTQTIPTNLTDAYNRIRGKEYYATQRYKFGFYQEEEQDTTVIRTFIPVTSIIHTIEYNENKHRFVNQSATEDTTYFANTYLGLGGTNEETRYQSIRNTFGISLLEGFNKYAKMGLAAYATYEYRHFSLPQDTLSAGTTIEGLTPRPDISNPRSHGESLLWVGGEISKQKGELLTYHVNGKFGLAGAIIGDIDVTADIRSRFRLWNDTVQLRAYGFFKNTEPSYFYKKYTSNHFIWDNDFGKTRRMRVGGEFNIKRWRTKLNVGVENIQNYIYFDNNSLPRQESSMIQVFHAKLNQDFKFGVFNWENEIVYQKSSKPSIIPLPELSVYSNMYLLFRIAKVLHVQLGVDCRYYTKYKSEAFQPATLTFHTQDEIEVGNYPFMNAYINMKLKQTRFFVMMSHVNQGIFGGNNYFSLPHYPLNPSMFQMGLSIDFSNMNNESFNKYIEQAIKENWERIALSDFDGVSYHYKDIARKIAKIHLLLESAEIKKGDKIAICGKNSAHWAVAFFAAITYGAVPVPILHEFKADNIHHIVNHSEAKLLFVGDIVWEDLNETLMKNLKGIFLLNDFSLLRSKSEKLTDMRNRLNEYFGKKYPARFTPDAVSYYEDSPEELAVINYTSGSTGFSKGVMLPYRSLWSNVKFCLDHLPFLSAGDGIVCMLPMAHMYGMVIEMIHPFLKGCHLHFLTRIPSPKIIMDAFATVKPKLIIAVPLIIEKIIRTKVFPLLEKPLMKLLLKVPFLDTQLLTKINDKLYETFGGNLSQMIIGGAALNRDVEQFLRRINFPFTVGYGMTECGPLISYAPWDETRIGSCGRIVDRMEGRVNSSDSENIVGELQVKGTNIMLGYFKNEEATQAIFTEDGWMKTGDLCTIDADGFIYLRGRNKNMILGPSGQNIYPEEIEDRLNNMPYVCESLIIEQDGKLVALVYPDIDNAQHSNISGHALETLMEENISTLNKELPAYSQISRLKIYYEEFEKTPKRSIKRYLYQSHMTFDRKLFFSIGSLFIVFITIILLFEYNLEKENRQQSLNALLQDYNELIYSQIKNKEIDQISIDSIIQSITRKPLRVTIISALSGKVLLESQREKEPDSLANNHLDRPEIRSSLKNGNGYAIRYSQSFKKNFFYSAKRYDDWIIRSSLPFEREKFSILSPNNEFIYFMLAISIFAILLLYYFCHSLGKSIAALSQLSQQAEQGKPIHITIKSGVNDIGNITQSLTHIYDNLLKTKEKLSIEQEKLFKHLQFSKEGLAFFAKDKRIIMANNLFIQYLNFITDNTLSPSDYLFKEANLKKINNFISQKLYEQNEQEEFISESMVIGKGSRTFLIECIIFQDHTFEIAINDITQQEQESRLKRQLTQNIAHELKTPVSSIRGYMETILSTEMDDSRKKMFMERCYAQSKRLTDLLRDISMLNRLDESKDLYDTDNTDLQKIINEVINESQAALTEREMTVETKNLHERMSINGNYSLLYSIFRNLTDNAIAYAGIGTKITIDCYLEDSKYYYFSFFDNGIGVPEEHLNRLFERFYRVDKGRSRKLGGTGLGLAIVKNAVLFHKGEIWVKNGLSGGLNILFSLRKVMANYKILVVDDEEDLCEILKFNLEVEGYDVDTANSAEEALQMNLTDYNLLLLDVMMGEMNGFKMASLLRKNEKLKHIPIIFLTAKDTEDDKLMGFNIGADDYISKPFSIREVIARVKAVLRRIVDKEDPAILQFEKLYIDSVKKRAFIDSTELPLTKKEFEILSLLLSHPGQVFSREEILSKIWTDEVYVLDRTIDVNITRLRKKIGEYGKRIVTRLGYGYCFETAMNVPKISSKTSLFLLLLVISTLTIIPYLGLTNFHTKGEPREAIVAVSMLQNDNWILPINNGGDIAYKPPFFHWCIAALSLPAGEVTEFTSRLPSALATIIMAIACFLFFAKRSRNDIAFLASLLLLSGFEVHRAAMASRVDMVLTCFIVLAMLQLYRWWELGLKGIPIWAILFMSIATLTKGPVGIVLPCAVIGIFLLFQKVSVWKAFYKIIPIALLSCILPLLWYYAAYQQGGEAFLRLVMEENVDRFLGKMSYGSHEQPIIYYVYITLAGWLPWSLLVIMSLFTLKYKRPQGTVKLYWERFKDYITHMDKMRLFSLLSIVIIFVFYCIPKSKRSVYILPIYPFIAYFLAEYMLFLLKQRPRIWRIFSIFIAFIGGFLLVVLTIVKSGIIDKYVMSSTSDISHYVTALSESWDIIFIITAIFIVFLIYDIYKSKRYLTYNNRYLYSVVALFFGIQLMLDASTLPAILNAKSMKPFADKVVSTVPNGEIYSYVSSSMMRFFIINFYAQNRVIDFEKEMPKNGYLLVGERDFNYIKEKYGEQYTFEQTLRSDRKGNDVKDYILLFNFQQNTAEMKVSVIIPCYNEEEVLPLSHKRFSQVMESTAHDYELIFVNDGSKDHTEELLLGFANDDPHTKVISFSRNFGHQNAVSAGLHNCTGDIAVIIDVDLQDPPEVIPQIIDTYLKEGSNVVYAVRNKREGETFMKKFTAKIYYRMLNSLSDYTFPVDTGDFRLIDRKVLDAFKQFPEKHKYLRGLFSWMGFKQTPFYYTRNERAAGRTKYSIRKMFSLASAGIFGFSKKPLKLAISLGTLSIFIALAFAIWVFIMYLSGKESIVPGWSSTIITIVFLGGVQLFTIGILGEYIGNIFDETKNRPEYIIDKKINFDPHNNQTIMFERLKKYDKKAIGQFIRFGIVGIINTLITLIVIYFLQEILHVKYTISNFIGYIAGVVNSFFWNKLWVFKKLNSNFIREAILFLICFGICYGIQFISLLILVEILYVPDSWAQLLSMIVYTLCNFIMNRCITFKKMNTTFATILEIVGTLAFAISGIRLAAAKQFDWFGAYAVGLVTAIGGGTLRDVLLNATPFWMINGSYLTVTAIALIFVIIFKQYLVKLENTFFIFDTIGLALFVVVGVEKTLMFGFPFWVAIVMGTITGSVGSIIRDILINEEPLLFRKDIYALACVAGGIMFYLGEKMGFNSITNQSICGISVVAVRLLAVKFHWSLPALKDDTTNPIKDMGIKMYLCTKCGNRLCSVESDKFVSAFVCTISLNTNLMKKRLLILLSVCFICVSIFPSSPKYEMRAVWITTNWGLDWPSRPVKVLSDRYIQQKELCCILDELQSVGINTVFFQARIRGEVFYSSRYEPWAAVLSHGREPGYDPLAFVIEECHKRAIECHAWLVTFPVGSNRQVKKQGSSSVVARHRSWCKQLSGEWFLDPGNPSVKDYLRALVGEVVSKYDVDGIHLDYVRYPDNAMRFPDTDSFRKWGSRSKSLLRWREDNITGIVTAIYEEVKRLKPWVKVSSSPLGRYASLEGFPAEWSCMEAVSQNPKDWLQSGRHDFIVPMMYFREENYYPFLYDWVNSCPPEKVISGLGVYRLDKSEGNWPFIEIKRQIETTRKMGVGQAYFRYENLHTHTILRQWLVSCFYRYPALTPGLKNPISQIPDTPNNLRVEAQGGVSNISWSPADGAFTYVLYATNDSLDMNTGDQIVAVLPKNIHSCSLSIPYRNYAIVARDRYGTESEPAFWTGKNIEPDKYRITLMYPLKFEDILRPMIWGGEEISRFKQLPEVHPGIGESWEISQVGERVSVVSEGEDKGKTITELIKRDGANLLGKHVAARYADKFPLLIKFIDAHDNLSIQVHPNDELAMARHNSFGKTEMWYVIDAKPGAGLYSGFSKQITPAEYVERIKNNTITDVLQFHEVKSGDVFFLPAGRIHAICEGILIAEIQQSSDITYRIYDYDRRDAQGNARELHIEQSIDAVDFKMYDNLRTDYAAKNNDAVGLVKCPYFETNLIEVDKSVKRSVSGHDSFVIYMCMGGKVRLTDNNGYTISLHQGQTALIPATLSWVTIEAETSAKLLECYIPEMTTKERYAGVIKWFQENKPIAETELQYHDPFQLLIAVILSAQCTDKRVNMITPALFEAFPTPQDLAAATPEEVYTYIKSVSYPNNKSKHLVGMARTLIEQFNGVVPSEIEDLQKLPGVGRKTANVIASVVFNKEAMAVDTHVFRVSNRIGLTNHSKTPLETEKTLVKNIPGHLLPIAHHWLILHGRYICMARKPNCLECGIRPYCKYYNHNQKNNAEEMEFCKVACVLAGGGIGSVARFFIASEIQRLFPAYPWGTLCVNLAGSFIIGILWAFCYSFDFSPNLRAFLFVGLLGGFTTFSSFSLETMNLLNLGKAHSALFYIIGTNLGGIIAVFGGFFLAKYSLHMIKFLMIEKIQRIKAEIEALKVSKSEDLENIRIKYLSKKGEISQLFNDFRTVAAEQKREVGKQLNELKTLATERINALKSEFEDTHSESQNIDLTRTAYPIPLGSRHPLSLVKNEICDIFARLGFSIAEGPEIEDDWHVFSALNFAEDHPARDMQDTFFIQRSPDILLRTHTSSVQTRTMEHSQPPIRIICPGRVYRNEAISYRAHCFFHQVEALYIDKNVSFADLKQALLYFAKEMFGSETQIRLRPSYFPFTEPSAEMDISCNICGGKGCAFCKHTGWVEILGCGMVDPNVLEACGIDSKIYSGYALGMGIERVTNLKYKVKDLRMFSENDVRFLEEFESAHMSVSPFLQSIHEFVEDKKLLDKSGPVIVGVSGGADSIALLHVLKSLGYSCIVCHCNFNLRGEESLRDRNFTRQIAFEWNLPFEEISFDASCYAMTNNVSVEMACRQLRYDWFEEKRKQYRAQAIAVAHHRDDSVETLLLNLIRGTGIAGLTSMKPRNGFVVRPLLTVSRKDIESYLSEHGVSYVVDCTNLESVYIRNKIRLQVLPLLRSINPSVDHSIYSSILNLREVESVYKAAIHEQEQNVLEYKGEYIYIPVEKLKQLPSPKAFLFEFLTPYGFVSEQITEIISSCGGISGKVFLSRNYRIVKDREYLILEPQEREEAGTVVEKIESLEECGTLLHGNLSYRCLDNDETYCFSRDKSYACFDLDKLVFPLIIRRWETGDRFTPFGMKGSRKLSDYFRDRKYSLIDKANALLLCSGNTIIWILGERAADGYRVTADTKRIIEFKYEKMYNILELSAKTLDQLKVIAAEMGIQKIDGIEQEDLVYKILDQQAIDMASKAAANPPAPKKRGPKPKKNKEKSVLEKPNELESKSNTEPTPSLSVESTGVEDTKEVKKKGRKKKSDVTSETSKKEDAKQDNVTEVKDIPSIIEETGLSSHPALKEPVAELFENLKESSMALVENNGSNENEELPQQSTQGGQPKQRKRIQKKALPAELINEAQNTLQTPSPSVPVTTPSTPVENKQQEIIQQQPATANQGQQAPLPTSSLQTFFPHSEKQRFVPRGQRTFVPQNRNSQNNAGNNNGQNQNSNNQQTFVPEPKPVERPYDFDGILTGVGVLEMMPDGYGFLRSSDYNYLTSPDDVYVSQSQIKLFGLKTGDVVEGPIRPPKEGEKYFPLVKVEKINGRTPEYVRDRVPFDHLTPLFPDEKFDLTSGKYCNLSTRVVDMFSPIGKGQRGLIVAPPKTGKTVLLKDIANAISENHPEVYMIILLIDERPEEVTDMARSVKAEVISSTFDEPAERHVKVASIVLEKAKRMVECGHDVVILLDSITRLARAYNTVSPASGKVLSGGVDANALHKPKRFFGAARNIENGGSLTIIATALTETGSKMDEVIFEEFKGTGNMELQLDRKLSNKRIFPAVDITASSTRRDDLLLPKDTLNRMWILRRYLSDMNSIEAMEFMRDRMERTSSNEELLLSMNDMEIPSIQLSLEHIEELDFTCPAAKKSINIGKEIIPVKFVVNIYPDVKRDYFKLITGVRYIRRRNFIGQELLFYRIAVVYKIEKLKDFVKLENSQVTVDTRLLALLLSISIGSMRGMLALRTQNTVFKNYPLPLINVSEILTSMNITDSEGIWENLNIYYNNMNKLILLRHGESIWNKENRFTGWTDVPLSEKGRDEARRAGELLRSFSIYPDISFTSLLKRAIVTRFLVMEELDRLWTPAYKDWRLNERHYGALQGLNKLETSEKYGAEQVHIWRRSYDVRPPQVGDEDPRYPAHDARYQMVQEKLLPHGESLEDTVHRVLPCWKERILPEAEKGKTILVAAHGNSLRALIMMLQNLSPKQIVDVEIPTGKPLILELGENLTVLNQYYLGMKTNKTNAARLLDRAKIPYELVPYEVDENNLAATHVAEQLGENIEQVFKTLVLRGDKHGIFVCVIPGDKEVDLKKAAKISGNKSAEMIAMKELLPTTGYIRGGCSPIGMKKNYPVYIHESCLSHDPIYISAGQRGLQIKIAAGALIEFVSAEVGDLVGMNKEEWFPLIDEQGNTIGKATRRECHNGSKLLHPVVHLHIINNDGELYLQKRSTNKDIQPGKWDTAVGGHIDYGETVEEALAREVREELGITHFIPIHVLTYIFESDQEREMVNTFYTVYTGKMQIDPVEIDDGKFWTFSEIHENMGKGIFTPNFEQEFLRIESRLIRAFKQETMKKDCEMSNSKTRPEKRILSFLVSSFKLQNNIMKVCIAEKPSVAKEIADIVGAKNRHDGYYEGNGYQVTWTFGHLCTLKEPHEYTDSWKQWTLRSLPMIPTRFGIKLISDRGIEKQFGIIESLMSNAEAVINCGDAGQEGELIQRWVMQKAACKCPVYRLWISSLTEEAIREGFQNLKPQTEFDSLYFAGLSRAIGDWLLGMNATRLYTLKYGQNRQVLSIGRVQTPTLALIVNRQLEIEHFVPQPYWELKTLYRETTFAVTKGKFQTEAEGKEFLQKIEGFPFTVTDITTKQGKEAPPRLFDLTSLQVECNKKFSFSAENTLKIIQSLYEKKVTTYPRVDTTFLSDDIYPKVPGIMSALTAYTTLTALFSTGKIPKSKKVFDNSKVTDHHAIIPTNVKATNLTGEEQKVYDLVARRFIAAFYPDCIVSNTVVLGEVNQIEFKATGKQILSPGWRTVFGKEENNEESESTLPAFTKGETGPHTPSLAEKWTQPPKPYTEATLLRAMETAGKSVEDEELRDALKENGIGRPSTRAAIIETLFKRHYIRKERKNLVATQTGVELIGTIRNELLKSAELTGIWENKLRKIERNEYRAADFLEELKKMVGEIVLYVLSDNSGKITAAPPPEEPKKKSTTSAKPGKKKTTNKTSTEKKPKEQLLSCPVCHTGHIIQGKTAYGCSRWKEGCGFRLPFDEAGNPLDEETLQKRIQDYNPNTHLNHEMRAFLSLFLPLLISSLHAEKIITNPNWVARNTPVVTVDSILLRDTVSRMYITLKQLPHTSLTIHDDWVVQDSIKRFSGKVRDIDGVDFNRIFQFDSDSTIHIEMDFPALPPSLTEVDIIGNQKSNEIRIIGLSLTEKRNKTSIYPQPNPIYRSATPAITFDTDTAILQGKFVGYHKRLNLPDGKIIQDDLFSGKQTEINIPIAPDGSFSAKIPTRYPIQQKLIFGDRYIPFYIEPTDTLYIETYLDELFAPYRYSGEIEQNCVHSTYRGKNARINYELREIRLKNISETEDWIKSLNTLSKQKYYTSEENKFKAKLEYINSKYNQGEISDTSYHLSILNNYYNFIYHIFVYMNIIDENIINEYSIKNIDYISFADIFAMNDPLSTTSEYYLPFLMLLESWRAMTTPPNWEYSDFIKALEKRNMDLSNTEKETLKFVFGEIQTPPDNVERTIESFNKKSEKEQISMREEKLRALRKQTYETYFGPSTDFTCQLINTRSIIRLIHSLDRKLTETEIKEFTAPITDRRLLKVIDQTNFSYKPQSLQGHMSHTREEKIEAFGRFIDILDILREKCPWDHKQTNESLRPNTIEETYELCDALIRKDNEATKKELGDVLLHIAFYAKIGEENGSFDIADVCNALCEKLIYRHPHVFGTTHVDGSNEVEQNWEELKLKEKGGNKTVLEGVPSALPALIKAYRIQDKARNVGFDWEEKSQVWDKVFEEFGELKNEIENMNPDNMENEFGDLFFSLINAARLYDINPENALEHTNQKFIRRFNYLEQETLQKGKNLKDMSLAEMDAIWDEAKQKGLMKKFLGLLIVGMLFCMSSYSQIIEPVKWKVSMQGESNEKEIIFHAYIEDGWHLYATDIPSGGPIPTSFSFDEISNVSLKGDVTPSKRPHEEYSALFDMKLGWYNSTIDFKQTIFIENPDSFKITGYITYQACNDVTCLPPTKHEFSFGESKTPTTTAPVMTPVNLNTNSSSNLTSQKGWQPVVEELRAMSTEKLLQESSLWFIFISGFIGGLLALLTPCVWPMIPLTVSFFLKKQQSRHKAIGEAILYGLSIIIIYVGLGLLITLLFGASALNDLATNALFNILFFTLLVLFAVSFFGAFDITLPASWSNKLDRKADTATGIIAIFFMAFTLVLVSFSCTGPIIGTLLVEAASWGGTLAPAVGMGGFAIALAIPFALFAMFPSLMKQLPKSGGWLNTVKVILGFLELALSLKFLSVADLAYGWHILDRETFLVLWIVIFALLGFYLLGKLNFSHDSPIKHVSVPRLFLAIISLSFSLYMIPGLWGAPLKAISAFTPPLYTQDFNLYNKEVHAAFNDYNEGLAYARQEKKPILIDFSGYGCVNCRKMEASVWTDPIVKQILENKYVLITLMVDDKEKLKKPITVTENGKSVKLTTVGEKWSFLQRHKFGANAQPYYVIINSDGEPLAAPYGYNESVPKFIDFLQKGLKAFNKMVMPSVAYFRIFAKIVHISQIENRFGDMIWEIIDKICRMINKIIAEEKIQQVRKLLEKKEKIVITCHVSPDGDAIGASLGLYHFLDGLGKEVNVVVPDLLPRNLLFLKGTKEIVVYTRYPEFAEKLMSEAELIFCLDFNAISRIDRLQKSVSLSEAKKVLIDHHLNPEDFCDVTISHPEVASTSELIFRLICRMGMFDRMGLYSAEAIYTGMMTDTGNFTYNSNIPEMYYIIAELVKLGINKDKIYALVYNTNSVDKIKLNGYAVSEKMEVFPEYKAAMISLTREELKRYDYHKGDSEGLVNVPLGIEGIRFSTFFREDKEYIKVSMRSKGFFPVNKVAAEHFNGGGHLNAAGGEFHGTMEEAQALLRSILPLYDKYMVKDKDMVKIARILFVFFTVMMVLSSCDNGKSYADLLKEEDKAVKAFLADKIVINSIPADSVFVTLQDVGNNDTLAVPYYRLDDDGNVYMQVLDAGIQDDRFEKGNDVNIRFLRVDLKALMNGENPDPVGNTNPADYITIRFGETTLSSTTQYGTGIQYPMYFLGNECKVNLLIRAKLGFTAETSTVIPYLYTISYNKSKMSLIKSISGIRGTIGGKAGDGLNPLDIVKFTAAYATFIRKNTPVKTNKIVVGRDARISGEMVKHTVIGTLMGMGFDVVNIGLATTPTTEIAVTMEKACGGIILTASHNPKQWNALKLLNEKGEFLNAAEGQEVLNIAAAEAFDFADVDHLGRLYENNTYTQKHIESVLALDLVDVDAIRSAGFKVAIDCVNSVGGIVIPELLKALGVKDVIELNCTPDGKFPHNPEPLPENLTQIAGVMKEGKADVGFVVDPDVDRLAIVCENGEMFVEEYTLVAVADYVLKHTPGNTVSNLSSSRALRDVTRLYGQQYNASAVGEVNVVTLMKQTGAVIGGEGNGGVIYPASHYGRDALVGIALFLSHLAKEKKTVSQLKASYPAYSIAKQKIQLTPDIDVDALLVAVKEKYAQYDITDIDGVKIDFPDRWVHLRKSNTEPIIRVYSEARTPELAEETAAGVMAVIAEMTRKMKQKLSCLTLSIALLASSNWCNATNRYVSAGCDGDGLSWATAKGSIKSAVESCHTGDTVFVSSGLYNEYVSIVDGVNILGGYNADTGARNIETFETILDGTGLGKYLIVKYDSPCENPTLIEGLTLQNAEHSSDGGAAYIRANITLSKCRIKNCKGQNGGGVFNDGGVIKDCIIELCSSTSSGGAIRNSGGIVENCIMRGNQGKYGTIRNENGGIVRNCIIHNNSATVSGWPNSGGIYNPSGIVANCIIACNYGSQYAAIHSEGKTINTICWNNQAEEGFGDPIAFIEGNGSSHNAAVSGFADAKDALTLSSINTDATGPNFKSPTLFIGIPTSAADIEAMRAADWTFSNNSPCIDKGVADNDAPAYDIKGTVRPKGTGYDLGAYEYDPEAKDVAVQSVSLTLKSLSIEEEQQQWLSAIVLPSDASNKKVSWNSLNNSIAVVEGGLVTGKGIGETKIIVTTLDGNFKDTCHITVTEKPVIIIHPDVLEADKLSQDDYTIPSYIKMLMAKEAARADSSQINLLALKEEVQALVPKGMPYCVVTNINGDPSTRMAFAWFTNSGISSGKVQIVAKSNAVESDFTNATEIEAAHQAANNLNYAVSTSGILKAAALPTNTKFNYTSHKAIATGLTPNTTYSYRVGYDGNWSDIKSFITANTNKEEFKFLYMTDSHIMDNEYVENARWSAITAAQQVPDAKFLLFTGDFVETGTEQNSEWEWEQWFEVSMKPLLSRMALAPTDGNHDDTPNLNYTYHFNTDKAFNETATVKPQFDGITYSFVYGDALFMVYSHQDFWRGSYSYANGTSTYLSNDVANWFRDQVEKYPDTKWRIAAVHKNLFTGSGHQTDEDGALFRATLLPVFQELNIDFVIQGHDHIYEVMGPINNTTKTIVPGSVTNVELVSPDSNKNPKGQQGGTFNVKDGTLYFVNGTCGRKRYYPYTQDEMEAGFDKHKVEGYWDLFTGKYGQPGAPAFSEISVSSSEIEVKTYTSDANAQATLFDTFKIVKNGNTGIEENKQSAKLYPTYAKDKINTTESDIIRVNAIDLTGKIYPLPFDNQHIDVSNLTDGIYVVQIFTNEKTRSERIVKTSRMSFSTPAEIVAQAERAALNKISLSFPRTLVAAMLAGIYIAMGGLLSLLIGYGFPEWTAGNPGLQKLLSGCMFPLGLILVVLAGAELFTGNNAVLIPGFMKKKYGIMPILKNWTIVYIGNFIGAIFFVYIMVWCTGIVDADPWKSAIVQIAQAKVDMSGWVVFLKGIGANWLVCLAVWLGFSAHSTAGKMMGLWFPVMCFVAIGYEHSIANMFFIPLGMLQGAAISWSDFILANLIPATFGNIVGGALFVGCIYSYLYTKRMKRVLNLFLAVLLVCTVNGLGDLKAQSNNKVAQLEKLSAIENNPQKTIRKQTAAIRHSLKTAAFAESVELFGCMTYSSKWSTSENGEFGIYSFPAEEGTTFTPVKTAADFNLSAAVYADGKFCGYRVTTYGSTVYGVNYYLFDTDGWTRDIQQTLKASYDNYPISLAYDSKTKTIYGQFMSEAGTTRLCTVDLLSGQPTQVASTGDRMYFTLSFDKEGTLYGIADDGNLYTINTATGTAASIGATGIMPSNSQSATIDLNTGKMYWAAINNKLQSALYEVNLDNGKASLVSDYDETVVLLGLYTVPPAAAPQAPAAVDKLSVNYTSPERLDANITFTAPDKTFEGDKLEGSLEVSIYVDHQKLTLENATVVAGAEFSTPYTFTEGTHKVEAFVSNAEGDGVKSKIEIYAGVDSPAAVGNLQFTLEDNHATVSWEAPVNGANGGHFDAELLKYILVRYPGNDTINAEYTATVFTEDLPDVLGNYYYTVTAVAEKVGVATESNRIRFGSAFKGEFKETFDHASALDIFTIIDANEDGKTWAWINNAAGSDQLDKNADDWIITPPIELGTDYLYKLSFKTKGYGEFYTESFSTAFGSENTVEGMLNALGDYTVSGDTYLEKSSVIEVQEAGTYYFGFHHTSQGMYLLYIDDIVIEPFIPTTAPDSVTDFTAIPDPTGVLKAVLTFKAPTKAINGDELTTLSKIEILKEGNVILTENEVEKGKEYSFTVDGVQGMNHYNVIVYDEQGRGRDAEKSVFIGTDIPQHVQNLIASWDDENDQAALLTWDAPAETGANGGFINPEELTYNYGTYLFGSIIDMATGIKETSYLMTTAGLTKQTYTQGYICAVSAGGKGAYTPFGIMLGTPLAFPFAESFAQGNVSTETWSVATVGGDDTWGMYQNGGSLDAQDEDNGYAMLVNKKAEADDSRLESPIINIAGQDKLTLEFYLHTENAELTVETTVNGTIYEAASEALQSNGSNEWTKVSLPLDQLAGNKRIQLGFRGKTEKAGARIAIDNITLTSGSTGIADNTADNSSIYSEGRNIILTGLKGVQVTVYSLDGKTITNASLHTDYEVIPMQHAGCYLVHTEKGVTKVLVKMVFNTYLLLKTKIVDEKKAEKYKSSQFVNFDNLRKDMNSILSYIFLIILLLSGCKEQEKNAMTVQTPATHTDSYALIKSWGEYVRKGEYEILIDTAKTYYRKAIANHDKKTQAYVGAYIGQAYILSGQADSMFTYFNAAIPYVEEHHDTYIQTIIANGLGINARNTTLNYNASLAYFQEALQYADASEDKTNYYIILSNMTRIYYLRNDPSGIKYALEVYEGGSKLHNDYVRFLGALNVATMYYLSKNYDEALHYISEATAIATHMANTDEPDVIHGNILAAIGKPQQAELYFRKVLNHTQRTNIDVLTEAYLYYGNFLKAERRYDEANTAYQNGLILAEQQNHYYYRLQFYKGMAELFQEKGDIAMASQHKERHQSLADSIFNIEQERSFSHMILNYETEKAEKELSRKELLLSEKNRKLQLAVFVTGLIAVILIALYVLYVRKNHMYRQLVILYDTHRQRERQLLEQRDEKTDLVNTGQKNKALFEAVEKLMNDEHLYRSNSISIDMLVERLHSNRTYLSRMFTEQNTSFSEYINSYRIREALALLSEPENDIPLKVLSDSLGYNSLSSFYRAFQKEMGVPPSRFRQEIKKLHLDSMLFFNNVVPFDNKDSAKKKHRQIYRFIKVLCDRAEVPAGRGEYILQSNVFLQFLSSILFRKATEHGRGEVDAMIDTRFDTSIDLRGEIENYRQVALIKYYKMLLEIDPKKDRLTLLAVLRCIDKLERHSQERKRPRCDRKKMQADGTLAWHYQKRNQLFRKAGLYDIESTQYLVDHEEIFDTPEEREERERFEACRREALRKQEERKNEENEKAASETASTPENREEKESDSYERKPGDTSESLENGFGNREKNLTNHIDTPEYRPNPLSPLSGNIWCETYVRTPIGEPNPGFHAASFGCNRREMDRRDFLRKSAIGTLGLTLSPALFNSCGTSASKETSSDRLQLSFKPYDLKLKHAFNLAKSSRTHTPDVQVQLRFGEWTGYGEASMPPYLGETQESVCRFLGQLDLKQFTDPFRMEEILDYVDSVAPDNRSAKASVDIALHDLVGKIMGQPWYKIWGLSPEKCPDTSFTIGIDTAEVVRQKLREASPYNVLKIKMGLDNDKELVKIIRSETDRPICVDVNQGWDNKEYALEMIQWLSEQNCLFVEQPMPKEKIDEQAWLHERAPLPIIADEFLQRMPDVRRAYGLYDGINIKLMKSTGMREAYRMAILARALDMKVMIGCMTETSCAISAAAQLSPLAHWADLDGNLLISNDLFDGVKIVEGKITLLDRPGIGVVPLMNTSTVKIILCFLLIIPIMANAQSNDIQTWIERIGRQYAPDSRTAVYTVSSELLNDSIHILKGKCDNRQAVETLLRTLDTAGISYINAIKLLPDRRLGEKTRGIVTVCCAHLRSEPRHSAEMVSQAILGTPLLILEEQKGWYRVQTPDNYISWIIANSISVKTTAEWTEWKNATRYVYTGLQGYVYASADKNAETVSDIVSGCILQAAGKAGKKFIPVSFPDGRTGFLKHDECRELSEWASTPVNMNKIIQTAEGMMGTTYLWGGTSVKSADCSGFVKTAYFSAGIILSRDASQQALTGDIMPAEQWDECQTGDLLFFGNAPGKVSHVALYLNDGKYIHSSGQVKINSIDARDTDYYAIPLLGISRVVNKIGTPGITAVKRHPWYFEQKMKGTFFITGIDTNIGKSYATGWLAREWNSKGIKTITQKMIQTGNVGHSEDIDLHREIMGIPFTPEDKERITFPIVYSYPASPHLAAEIDDRIIPIEKITESTRILQSRYDVVLLEGAGGLMVPITRRYLTVDYISDQKLPVILVTSGRLGSINHTLLSIEALVNRNIPLYGMVYNTFPKTDERIDKDTEEYLKTYLNEHFPQAHFWTLPEIALPRMIQTFISRRHTDDLILLFAGWGMDTHPFAYLSHIGCDCCVCYDYTDLNFDTTPFLDYKNIEVYAWSFGVWAAATVLPDKGLPIRHATAINGTECGIDIEKGIPPEIFRATLEHLNEASLKKFYRRMCCEHLDDFKEAFPERDMNSLYDELRAIGENITLHPRPRFRWDKAIIGTRDLIFPARNQVNAWEGTTVVQELDEPHFFHFRPVVLENRLDKATIKNSFGNAASTYEREGLIQSRIARQLNDKIPSRLNKCIDNILEIGCGTGKLTRCLIDRFPDARFTINDLSPEMKDYITALPFKQLNFMEGDAEKIDFDETYHLIASASTIQWFTDLEGFLKRISGNLSDTGTIAVSTFAAGNLPEIQSLMTVEMPYWESADLKRLFEKHFRVELFEQEECTLRFDTPVELLRHLKNTGVTGISGHSRQKGFDFIKRYRKTFDGKKEITLTYRPVYIVAHKKTQIMNTYSSQLEQLSRQGNLRSLPAVDAQGLSIVRDGNTMLNFSSNDYLGLADDTDLKKVFLQNLNPRDVRFSSTSSRLLTGNFPVYARLEKRLAELYKAGASLVFNSGYHANSGILPAVTDNRSLILADKLVHASIVDGIGLSKARCIRYRHNDYEQLERLVSESASQYEAVFIVTESIFSMDGDECDLPRLVALKKHYPNIYLYVDEAHAFGVRGQCGLGCAEEQDVIKEIDFLVGTFGKAAASVGAFVICSDEMKRYLVNKMRTLIFTTALPPVNLEWTLFIIDKIVDMQSHREHLEAIGHKVRQALNPLNGAIVSSSHIVPFVLGETERTVQTALKLQHEGFYLLPVRPPTVPQGTSRLRISLSAGHTDTEIDRLIHTLTKISSGLMDNFDAQHLWHPYTSTINPLPCYPVKRAEGVYIELENGQRLIDGMSSWWAAVHGYNNPTLNKAAEEQLKKMSHVMFGGLTHQPAIDLGKLLLQIVPSSMQHIFYCDSGSVSVEVAMKMAIQYWHARGKVSKCNLITIRSGYHGDTWNAMSVCDPVTGMHSIFGDALPTRYFVPSPSCRFDDEWDPTCIAPLREAIEAHHEELAALILEPIVQGAGGMWFYHPQYLREAKQLCERYNLLLIFDEIATGFGRTGKLFAWEHAGVTPDIMCIGKALTGGYMTMAATLTTHEVAHTISSGNPGVFMHGPTFMGNPLACAVACASVSLLLSSGWKEKVAAIEAQLKRELSPAATLPQVSDVRMLGAIGVIEMKKPVDMASIQKQFVERGIWVRPFGKLVYIMPPFIITQSQLSTLTSALLEVVKTLRMKTSTSLSVHRVWFRRWNRHNYATFCSIGKCVNIGSVRKEIADKSLKKGLSTTSTDIVVGNMERSDKPSEEEHTAGSFFLPEILESTVDTPVTSCSTGHSCDNKQTFTIYIFRDNSGSFALYRIFHILKTLAYGMKSTFSVIYYLKRQVVKKDGTVPVMGRITVDGSQTQFSCKLTVDPKLWDTKGGRVTGRSTAALEANRMLDKMRVRINRHYQEIMERDNFVTAEKVKNAFLGLEHRYHTLMQVFRQHNEDYEKQVEAGMKAKGTLEKYRIVYKHLQEFLDIRYHVKDIALKELTPAFISDFEMFLRTDKHCCTNTVWLYVCPLRTMVFIAINNEWLTRDPFREYEIKKEETTRSFLTKEEIRLLMEGKLKNAKQELYRDLYLFCAFTGLSFSDMRNLTEENIRTYFDEHEWININRQKTGVVSNIRLLDIANRIIGKYRGLCENGRIFPVPHYNTCLAGIRAVAKRCGITKHITWHQSRHTAATTVFLSNGVPIETVSSMLGHKSIKTTQIYAKITKEKLNQDMEILAARLNGIEEFAGCTIMKRDIIIIEDKAVSVTGNEVWMTATEIAGLFHTTVPAVNAAIKAVRKSDVLNDYELCRYMQLENGLYADVYALEIIIPVAFRLNTYNTHLFRTWLVGKALSKDNRQAYVMFIQNGKVGYCMADDLIYSPTESEVMMNETNDVFTMEDEPIASVMQDMRKGSKWLSAFLESYRPPLDGERYLTDGEVAELLRVSRRTLQEYRNNRVLPFILLGGKVLYPETGLREVLEANYRKPLEMNMEIVSIEKKTFEMMVAAFGALSEKVAALRRKSDTGRMERWLTGEEVCGQLRISPRTLQTLRDRRLIGYSQINRRFYYKPEEVKRLIPLVGTLYPHGRMKVITMESSVFRSLTEQIAEIAAHVRAASGDKKAASSDRLLTTREAAQLLNVSTRTLQRMRSEQRIVYVVLRGKCRYRQSEIDRLLDECTVNEDAATPQELKRNHTLRTGGTPKGRRTMELLTRNIFEGWMQKLMERLDRQDELLLAIKTEERQPALTESIHLFDNQDLCMLLQISKRTLQRYRSVGALPYKTLGKKTYYSEEDVLTFLSNHIKDFKKEDIAFYKARIHNFFHKMAKKKDEKDVLVVRDEKTGEISVVAGLNADGTPKRTPAKAENAQSFLQFDRHGDVLDNFFKNFFRQCKEPSRFGFYRIAADQVDSMLGVMKDLLQHPYQNKQILAPHKIDTFPYQQQVMEEQAAQQTEKQEPQKQENMEQQKEQQQDNSEQTQGKRGYRPIDESKINWQELEDRWGVKRDDLEKSGDLTKMLHYGKSDLVKVKPTFGGESFELDARLSFKKDGEGNVSLVPHFIRKEQKLDEYKEHKFSDNDRKNLRETGNLGRVVDIVDRETGEIIPSYISIDRKTNEITDIPASKVRIPERIGKTEITAQERDMLRAGLPVRDKLIERNDGRKFVTTLQVNVEQRGVEFVPGTGKSPRTAQTQETKGDTSKNQAQGGENADQTKKEQRRNTWTNEDGSIRPISKWSGVNFTEQQKADYVAGKAVKLENVTDKQGFHATMYIKFNPEKGRPYRYDTNPDVGQQVAPSNESRTQVAVNNEGKTNEATKNLKEPLQKGQTAPKTARQQQQQDKPKKTGKGMKMMKTIIAEKPSVAREIARIVGATKREEGYFEGGGYAVTWAFGHLVQLAMPDGYGVRGFVRDNLPIIPDTFTLVPRQVRTEKGYKPDSGVVSQIKVIKRLFDASEQIIVATDAGREGELIFRYLYHYTGSTTPFVRLWISSLTDKAIREGLRNLEDGGKYDNLYLAAKARSESDWLVGINGTQALSIAAGHGTYSVGRVQTPTLAMVCERYWENRRFTPEAFWQLHIATDGCDGKVVKFSSSEKWKSKEPATELYNKVKATGFATVTKAERKEKTEDTPLLYDLTTLQKEANAKHGFTAEQTLEIAQKLYEKKLITYPRTGSRYIPEDVFAEIPKLLAFIGTQPEWKDKVRAKAIPTRRSVDDGKVTDHHALLVTGEKPLFLSKEDSTIYQMIAGRMIEAFSEKCVKDVTAVMAECAGVEFTVKGSVIRQAGWRAVYGEENKDETTIPGWQEGDTLTLKASSITEGKTKPKPLHTEATLLSAMETAGKEIEDDALRQAMKDCGIGTPATRASIIETLFKRGYMERCKKSLVPTEKGLALNSVVKTMRIADVAMTGEWEKELARIERGELSADTFRKKIEAYTREITSELLSCDKLFGSRDSGCACPKCGTGRMRFYGKVVRCDNTECGLLVFRLKAGRTLSDDEIKDLLTDGHTKLLKGFKSKQGKNFDAIVAFDGDYNTTFVFPEKKCKSSYPKKRKMNNKKKNEGQADFSYYGLYLLDYLRTNKFEQADDTAFIRERADRAAETYEKARLEGYPADGAQELAMDTLLRGLRYSRYDILREVVENEFSDEVPEEKREAFIHKLLPLVGNVFSVYDLSDDNFALSSDYDLLYTELTGATVLYLDEYGVMAFNRKQKLRDNIEAIRTAFILDREQRTATTEERAILQRYCGFGGLKCILNPAKELTDAVRWAKSDLELFAPTVELHRLIRENSNDETEYKRFVDSLKASVLTAFYTPKEITDTLADVLADYSVRPTRMLEPSAGVGVFVDSVLRHSPGADVMAFEKDLLTGTILRHLYPDKKTRTCGFEKIERPFNNYFDLAMSNIPFGDIAVFDAEFEKSGSFGRRSAQKAIHNYFFLKGLDAVRNGGIVAFITSQGVLNSSKTSVRNELFSQANLVSAIRLPNNLFTDNAGTEVGSDLIVLQKNLSKKEMSQDERLMTVIQTDTKTDLTDNAYFIHHPERIVHTTAKLDTDPYGKPAMVYLHEGKTAGIAGDLRRMLDEDFHYRLAMRLYSGTIRQAGTEERVAVQKEMERPAIKLETVPPAQAVETPTEKPQSAEEKPEIEPRPKYSAGVQLTLLDLWGMTEEVSQPKTAKKKKTAKKESPARRVTPKSQVQTTQNVTAVPTASTPKNVTENKEAKADSAAKPADPDDIYAKLDWETNPPINGFYEMMMGLTPERRKELRELARQHNEKQENRTVATVTPEVPREHPRQEKTQPEVAATPAATAAPPEAVATSLFPDIEPEKPKEEVVDLTPRAYHRTPEMHLREGSLVTDWGRHNIGYLKDITPYGATFQPLDLKGYQKEKALQYVLLRDAYERLYRYESNLHEANVQWREHLNTCYDEFVMRYGNLNAKQNVKLVMMDAGGRDILSLERVKNGKFVKADIFERPVSFAVESHANVGSPEEALSASLNKFGTVDLDYMREITDSTAEELLTALQGRIYYNPLVTGYEIKDRFIAGNVIEKAERIEAWIGDNPENERMPEVKQALEALKDAEPPRIAFEDLDFNFGERWIPTGVYAAYMSRLFDTEVKIAYSASMDEFSVACSHKNFKIWDEFCVKGYYRSYDGMHLLKHALHNTCPDMMKSIGKDEHGNDIKVRDSEGIQLANAKIDEIRNGFSEWLEEQSPQFKERLTTMYNRKFNCFVRPKYDGSHQTFPDLNLKGLASRGIRSVYPSQMDCVWMLKQNGGGICDHEVGTGKTLIMCIAAHEMKRLNLAHKPMIIGLKANVAEIAATYQAAYPNARILYASEKDFSTANRVRFFNNIKNNDYDCVIMSHDQFGKIPQSPELQQRILQAELDTVEENLEVLRQQGKNVSRAMLKGLEKRKHNLEAKLEKVEHAIKSRTDDVVDFKQMGIDHIFIDESHYQNFYEFPKFRIKLLILILLHFNIVRIIYMQIAACLHDWLEHHVPSIKACSRHTLRNYHVSMTLYAEFLRTVKGITPETLNADCFCKKNIEEWIVWMKKVRNCSPATCNVRLSALRAFLKYLSDNDISFVSVFLQAENVPNEKTPKRKVIGLSKLAVDTLLSMPNQRTAIGFRDYTLLLLLYSTAVRINELLTLKICNITMDCAKPHIIVIGKGRKRRPIPLLAKPVQYLKKYLTEYHPNPGDAEALLFSSKSRGIYTPMSAENVNKMLKRYAKMAHGKCSDVPLDIHAHQFRHAKASHWLENGMNIAQISYLLGHENIQTTMVYLDITTEQEEKALETLEDENQRCVGKKWKSAKGKMELEVFLGLHKMKTISFLSNAIEGYVKYRKASGRNSHSYVKNVILFDHFCAREYPGQTELTQEIVDRWCRQRPTECTNSCVSRVYPVLDFIKYMNKRGMTKIDLPQVPRSVPRTYTPHPFTHYELKRFFDACDNIKPRRGRLAAIQRMTLPVFFRLLYSSGIRTTEAILLERDDVNLENGVVSIKRGKGYDQHYVVLHDTMLPLMRTYDGKIDGLIPNRRVFFPTPDDKPHPPVWVTYHFRVLWQSCNSSRAIPYELRHNYAIENINSWTHQGFAVHDKLLALSKSMGHRQIESTLAYYSLTPAISDIMACTDNEISQQLTQDDYEKEDMDIFNLNEKVEGLVSYLQETGYSAMYIGYVKKMAEWLSENANHYKWQSFSDVEPTLKELWSNKYTYRNKVRLLRVICQYIENGLLPDGCKHYSKPHHYELLGAEYKDVTDMAFNMVDRRCKFSINVKYALSSFFFRLQEMGVYSFESITENAVLEVFSKDGKPKMGHSFKYSVEYGLKSCLPHYGKSVERIIAYLPSIPNMRKNIQYLTEQELTAIRHTLEHDSTISLQDKAIITLAMYTGLRGCDISALTLDSFDWEHDLIKITQAKTGQPLTLPLRAVVGNAVFDYLLKERPRSPEPYVFLTVQVPYRRLHTSNLDAICSKVMCKAGIRQGENERKSLHLFRHNVATALLQGGVQQPVISATLGHASPDSLDRYLSAEFKRLKECSLSIEYFPVGKGVFDVMSHQFKNLTFNTRHDRVAGLGNSEGSQKALNMLFAIRTIQERTGKDLGATFLSGTTISNSLTELYLLFKYLRPKELERQDIRCFDAWAAIFAKKTTDFEFNVTNNVVQKERFRYFIKVPELAAFYNEITDYRTAEDVGVDRPAKNEILHHIPPTPEQEDFIQKLMQFAKTGDATLLGRLPLSETEEKAKMLIATDYARKMALDMRMIDPNYEDHPDNKASHCAKMIAEYYQKYDAQKGTQFVFSDLGTYQPGDGWNVYSEIKRKLTEDYGIPPSEVRFIQECKTDKARKAVIDAMNAGTVRVLFGSTSMLGTGVNAQKRCVAIHHLDTPWRPSDLQQRDGRGVRAGNEIAKHFAGNNVDVIIYAVEKSLDSYKFNLLHCKQTFISQLKSGAMGARTIDEGAMDEKSGMNFSEYMALLSGNTDLLDKAKLEKRIASLEGERKSFNKGRRDSEFKLESKTAELRNNTAVIDAMTEDWNRFLSVAQTDREGNRLNIIKVDGVDSTDEKVIGKRLQEIAKNATTGGLYTQVGELYGFPIKVVSERILKEGLEFTDNRFVVEGNYKYTYNNGHLAMADPLAAARNFLNALERIPSIIDQYKTKNEVLEREIPQLQEIAGKVWKKEEELKQLKSELAALDRKIQLELAPPTPEVAEKENEGQQVKPEAEDVRNRQAQYSENAPPQIRNPSESIIPNHTITGHPGLYAKEETRFKGLKIMNIINLGILAHIDAGKTSVTENLLFASGATEKCGRVDNGDTITDSMDIEKRRGITVRASTTSIIWNGVKCNIIDTPGHMDFIAEVERTFKMLDGAVLILSAKEGIQAQTKLLFNTLQKLQIPTIIFINKIDRAGVNLERLYLDIKTNLSQDVLCMQTVVDGSVYPVCSQTYIKEEYKEFVCDHDDNILERYLADSEIPPTDYWNTIIALVAKAKVYPVLHGSAMFNIGINELMDAITSFILPPASVSDRLSAYLYKIEHDPKGHKRSFLKIIDGSLRLRDVVRINDSEKSIKIKNLKTIYQGREINVDEVGANDIAIVEDMEDFRIGDYLGAEPCLIQGLSHQHPALKSSVRPDKPEERSKVISALNTLWIEDPSLSFSINSYSDELEISLYGLTQKEIIQTLLEERFSVKIHFDEIKTIYKERPVKKVNKIIQIEVPPNPYWATIGLTLEPLPLGTGLQIESDISYGYLNHSFQNAVFEGIRMSCQSGLHGWEVTDLKVTFTQAEYYSPVSTPADFRQLTPYVFRLALQQSGVDILEPMLYFELQIPQEASSKAITDLQKMMSEIEDISCNNEWCHIKGKVPLNTSKDYASEISSYTKGLGIFMVKPCGYQITKGGYSDNIRMNENDKLLFMFQKTMSSKMERSGNFYKAIRLGYILISILIGCMAYNSLYEWQEIEALELGNKKIDELRKEINNINIQMIKFSLLGETILEWNDKDIEHYHARRMAMDSMLCRFKVTYPAERIDSVRSLLEDKERQMFQIVRLMDEQQSINKKIANQIPVIVQKSVQEQSKKPKRKGFLSIFGKKEGTKPTTTTTTLRSSNRNMVNEQKAQSRRLSEQADSLAARNAELNRQLQGLICQIEKKVQSDLQNRESEITAMRKKSFMQIGGLMGFVLLLLVISYIIIHRDAKNIKRYKRKTTDLIEQLEQSMQQNEVLITSRKKAVHTITHELRTPLTAITGYTELLRKECNSGNNGQYIQNILQSSDRMRDMLNTLLDFFRLDNGKEQPRLSPCRISAITHTLETEFMPVAVNKGLSLSVKTGHDAIVLTDKERIIQIGNNLLSNAVKFTEEGGVSLITEYDNGVLTLVVEDTGTGMTEEEQKQAFGAFERLSNAAAKEGFGLGLAIMRNIVSMLGGTIRLDSKKGKGSRFTVEISMQEAEEQLGYTSDTPVYHNNKFHDVVAIDNDEVLLLMLKEMYSQEGIHCDTCTDAAALMEMIRQKEYSLLLTDLNMPGINGFELLELLRSSNVGNSPTIPVVVATASGSCNKGELLAKGFAGCLFKPFSISELMEVSDKCAIKATPDGEPDFSALLSYGNEAVMLDKLMTETEKEMQAVQDAAIEKDLQKLDSLTHHLRSSWEVLRADQPLRELYGLLHGDTLPDGEALSRAVTAVLEKGAEIIRLAEKERRKYEDGMDKTKIIVVEDNIVYCEYVCNMLSREGYHTMKAYHLSTAKKHLQQATDNDIVVADLRLPDGNGIDLLRWMRKEGKMQPFIIMTDYAEVHTAVESMKLGSIDYIPKQLVEDKLVPLLRSIQKERQAGQRRMPVFAREGSAFQKIMHRIRLVAATDMSVMIFGENGTGKEHIAHHLHDKSKRAGKPFVAVDCGSLTKELAPSAFFGHVKGAFTGADSTKKGYFYEAEGGTLFLDEVGNLALETQQMLLRAIQERRYRPIGDKSDRSFNVRIIAATNEDLEAAVSEKRFRQDLFYRLHDFGITVPPLRDCQEDILPLAEFFREIANKELECNVSGFSSEARKALLTHAWPGNVRELRQKIMGAVLQAQEGVATKEHLELAVIKPTSHVSFALRNDVEDKERILRALKQANGNRSVAAELLGIGRTTLYSKLEEYGLKYKFKQSMGKVQILAVLTMDGCLSSELYDKAHQDLCLDRCGLDEIREKALYHVTPDMAKSAAENIKSNTQFYKVLDFKGIKFNIFSQGQIISDLNCLMNYFLLAETDFFRLINEAGDCNMETAYTAFATQVIELCNGGMDMNLTVIALAYIEIELQHHPVRNLSEEKREIAAYVSKALSFVRKMQKFLATPQVPPLISANNATETTASLLQWTGNAIDLVELIYGIDEMGCINNGNMPLKQLAPLLYKIFGVESKDCYRFYTDIKRRKNESRTYFLDRMQEKLNERMLRDDELDRMRRMNSIHDITDYIILRVKSEDRFASLINLKLQKLLYYVQAWSYGINKKPMFDGEFEAWIHGPVNREIYNRFNSTKYLYSEINIDDCMNHNVSLSSEDAEFIDFILENYLKYSGAELERLSHNEMPWIETRGDLNVNERCDKVITPELMIEYYGKKWETIKSMGKNGKLLNLNSDSPKYGNKSLVTKEQENELKRRKITFSFSYFKQIPNFQIGECSKGWHIGLLERLGALGTMTPQEVLEENRGSIALRCHPIDWSAKNIPIQRKDLDWLPKEILDNETDFPIMQFSITKSTGRIVGYFDRDSSIFHIVLLDPEHNIQPAKKTNYQIQPTTKGLSQYDDLLNKLERIKSIVSDCSDKKCKLHSHISVIEELHDNIVYIGLDNDFYSTYQEILKKIPLQKILENGILVSMDNAMSQEDDLRALAKIMDFLRAVSIILVVMNVYWFCYEAIRMWGVNIGVVDKILLNFDRTAGLFHSILYTKLFSVLLLALSCLGTKGVKGEKITWGRIWTAFAVGFVLFFLNWWLLPLPLPLEAVTGLYVLTIGTGYVCLLMGGLWMSRLLKHNLMEDVFNNENESFMQETRLIESEYSVNLPTRFYYRKRWNNGWINVVNPFRASIVLGTPGSGKSYAVVNNFIKQQIEKGFSMYVYDFKFSDLSTIAYNHLLNHPEGYKVKPKFYVINFDDPRRSHRCNPIHPDFMEDITDAYESAYTIMLNLNKTWVQKQGDFFVESPIILFASIIWYLKIYQNGKYCTFPHAIEFLNRRYEDIFPILTSYPELENYLSPFMDAWLGGAAEQLMGQIASAKIPLSRMISPQLYWVMSDSEFTLDINNPEEPKILCVGNNPDRQNIYGAALGLYNSRIVKLINKKGMLKSSVIIDELPTIYFKGLDNLIATARSNKVAVCLGFQDFSQLVRDYGDKEAKVVMNTVGNIFSGQVVGETAKTLSERFGKVLQKRQSISINRQDVSTSINTQMDALIPPSKISGLTQGMFVGSVSDNFNERIEQKIFHCEIVVDAEKVKREESAYKKIPVITDFTDEDGNDHMKETVQANYRRIKEEVKQIVQDELERIAGDDNLKHLLQQKMVAKISVGNSLYGAIAYNGEKINEAQGRLLTTNRIYNDGSGTVDISKAMEGFHTFLPPQMKVEKPVVHISLNPHPEDVLTDIELQNIAREYLEKLGFGNQPYLVFKHEDIDRHHLHIVTVNVDENGKRLNRDFLYRRSDRIRRELEQKYGLHPAERKNQGLDNPLRKVDASAGDVKKQVGNTVKALNGQYRFQTMGEYRALLSLYNMTVEEARGNVRGREYHGLVYSVTDDRGNKVGNPFKSSLFGKSAGYEAVQKKFVRSKSEIKDRKLADMTKRTVLSVLQGTYDKDRFISRLKEKGIDTVLRYTEEGRIYGATFIDHRTGCVLNGSRMGKELSANALQEHFTLPYAGQPPIPLSIPADVADKVYGQTAYDREDMSGGMGLLTPEGPATDAEEEAFIRAMKRKKKKKRKGLGMMKEKRKSKAGRNPKLDPAVYRYTVRFNEEEHNRFLAMFGKSGVYARSVFLKAHFFGQPFKVLKVDKTLVDYYTKLSDFHAQFRAVGTNYNQVVKELRLHFSEKKAMALLYKLEQHTVELVKLSRQIVELSREMEAKWSQKSVMRKGTFKYPDNRFGGHLPKRIPEPSETRLSDNPMTYGFNDFMTQCRHSSLVRRTASPQNRIRGDPPVCLFTETDNAVIQSACKQKIKSSTIKLNRTMSKEIFVAFATQKGGIGKSTVTALAASYLHNVKGYNVAVVDCDDPQHSIHGLREHETALIGGSIYFKALACDHFRKIKKNAYPVIKSNAVNALDDAERMIAAEVMKPDVVFFDMPGTLRSNGVIKTLSQMDYIFTPLSADRFVVESTLKFVTMFRDRLMTTGQAKTKGLYLFWTMVDGRERNDLYGIYEEVIAEMGFPVLSTRLPDSKKFRRDLSEERRSVFRSTIFPMDTALLKGSGIREFSEEISDIIRPQMGSRKVNTEGIDEELLLASIGRRTQDGTLRPAQEVPATAPTEDDTAVPEPPPAQPVARERTQREGGRRKRQDEDYNELFLRRNEIKTRQCVYISRDVHGKILRIVNDIAGGEISVGGYVDTVLRQHLEQHKERINELYKKQREDLIMEKEMTPNEKRPQQDCGGMLAQVKASVEILSLVPVSGKCSEKDYERLFIRDPEVKAREGKMAYVRPEYHERIMRITRVIGHDRLTLSAYIDHVLTHHFNQCEDAIKSLYARNYNSVFMNETISMTDILLAVSVGCNLWFLFLLLYERIMETRLVRFFKGIAGLWRSLDRNGPKSVAAHEEVPTAKGDIIGKSRFKMASTRTTAAIPAQEAATSEKGIELSEEEATFDDGNTETASRPAQVPEEKLDETFTSIPPEELGYGEDEPDEDASDTPRASGSSFDEIDDACKTAKNPDATQAQREKAAKVFTDMEGTELYEKMMEGSSEIGIRIKGLIEIRLKKSEKEFVVPDNIEEFDIRNYVMNKNILKNRKAILSAALVIAATASAFAQGNGIAGINEATSMVSSYFDPGTKLIYAIGAVVGLIGGVKVYGKFSSGDPDTSKTAASWFGACIFLIVAATILRSFFLMAEYPINKGIGRPVEFKGLKAQYLFIFCGGLLALFVLFVILYMVGIDQWVCIGFGAASSSLLVWQTFALNARYGEHGLMKLGAARSHPRYLINRRRITRLFKRQRKEETTMRNTSKMTTLENKFPLLAVEHGCIISKDADITVAFEVELPELYTVTGAEYEAIHGCWCKAIKVLPDYSVVHKQDWFIKERYKPELQKDDMSFLSRSFERHFNERPYLKHTCYLYLTKTTKERNRMQSNFSTLCRGHIIPKELDRETTTKFMEACEQFERIMNDSGLVRLRRLSTDEIVGTEGKAGLVERYFSLMPEGDITLQDIELSAREMRIGDNRLCLHTLSDAEDLPGKVATDTRYEKLSTDRSDCRLSFASPVGLLLSCNHIYNQYVLIDNSEEALQKFEKSARNMQSLSRYSRSNSINREWIDQYLNEAHSYGLTSVRAHFNVMAWSDDAEELKHIRNDVGSQLASMECVPRHNTIDCPTLYWAAIPGNAADFPAEESFHTFIEQAVCLFTEETNYRSSLSPFGIKMVDRLTGKPLHLDISDLPMKRGITTNRNKFVLGPSGSGKSFFMNHLVRQYYEQGAHVVLVDTGNSYQGLCGMIRRKTDGADGVYFTYTEEKPISFNPFYTDDYIFDVEKKDSIKTLLLTLWKSEDDKVTKTESGELGSAVSAYIERIQSDRSIVPSFNTFYEYMRDDYRKELAERDIKVEKSDFNIDNMLTTMRQYYRGGRYDFLLNSTENIDLLGKRFIVFEIDSIKENRELFPVVTIIIMEAFINKMRRLKGVRKQLIVEEAWKALSSANMAEYLRYMYKTVRKYYGEAIVVTQEVDDIISSPVVKESIINNSDCKILLDQRKYMNKFDQIQALLGLTEKEKGQILSINMANNPSRLYKEVWIGLGGTQSAVYATEVSAEEYLAYTTEETEKVEVYRLAEKLGGDIEAAIRQLAEKRRNKETTNNMSLQKVKMLQVSKCLIGLAVMMLQSCDVADNLRDMLCGNWESVEGKPDVLIYKEGEAYKVTVFRRSGLRRKLKPETYLLQEENGNLFMNTGFRIDVSYNEATDVLTFSPGGDYVRVKPQPGHPTEEMRTRITMIICLCLLFAGRASAQWVVSDPGNLAQGIINASKNIIHTSKTATNMVSNFQETVKIYQQGKKYYDALKSVNNLVKDARKVQQTILMVGDITDIYVNSFQRMLRDGNFRPEELSAIAFGYTKLLEESNEVLTELKNVVNITTLSMTDKERMDVVERCYSKMKRYRNLVSYYTNKNISVSYLRAKKKNDLDRIMGLYGNMNERYWMEFDNLHQILRSLYEQMMPLCGDMAGVAKGIAGLGALFYVAYRVWQSLARAEPIDVFPMLRPFAIGLCIMFFPTVVLGTINSILSPVVQGTAKMLEAETLDMNRYREQKDKLEYEAMVRNPETAYLVSNEEFDKQLEELGWSPSDMVTMAGMYIDRGMYNMKKSIRDFFREILELLFQAAALVIDTVRTFFLVVLAILGPIAFAISVWDGFQSTLTQWICRYIQVYLWLPVSDMFSTILAKIQVLMLQSDIERMQTDPNFSLDSSDGVYIVFLCIGIIGYFTIPTVAGWIIQAGGMGGYGRNVNQMAGRAGGMAGSVAGAATGNMMGRAGKLLKMEFKSLRNIESSFRQIRLFGIVFLSLCAVVTVWSVWSSYRFAEKQREKIYVLDNGKSLMLALSQDLSQNRPAEAREHVRRFHELFFTLSPEKSAIEHNVKRALLLADKSVYHYYSDFAEKGYYNRIIAGNINQVLKVDSVVCDFNAYPYRAVTYATQKIIRQSNVTERSLVTTCRLLNASRSDDNPNGFTIEGFTIIENKDLQTIKRMWGVYWKLHDKRKQLVARLKGYLDGLPPETRRRIVLGMLAAFTVLALYTFGRAIYDIGRNDGSRMETGHAGRVELPTPAETDNHLTPYLYGTDEEMKENKTAPDTGKPKKEREPLTEAQRLKRQKMIVLPAMVLVFIGAMWLIFAPSSGKEQQPGTDGYNTEMPDADKANKQIIGDKLKAYEHGEMEERLESRNRAIGQLGDMFDREIAGTEDGTDFDLANPGGKEEKAQPATPQTIQSSAAAYRDLNATLGNFYEQPKNDNAEMDELLERIASLESELESEKGRTSSMDEQVALMEKSYELAAKYMGGQNGGKPEQAAEPSTVQKGKKNTATPVRQVTRQIVSSLAQPMSNAEFVATFSQERNRGFNTAVGTTEVSDRNTIPACVHGAHGVMDGQTVRLRLLEPMAVAGRIIPRNAVVVGTGKIQGERLDIEVTSLEYDGTIIPVELAVYDTDGQPGIFIPNSMEMNAVREVAANMGGSLGSSINISTNAGAQLASDLGKGLIQGTSQYIAKKMRTVKVHLKAGYRVMLYQEKDMRKVIIMFALAMGIATANAQENVTVEQNNGSNEQPTLTKEVYPQKEADGDLYHGLSRKLAFDRMIPPHGLEVTYDKTVHVIFPAEVRYVDLGSPDLIAGKADGAENVIRVKATVRNFPNETNMSVITEDGSFYTFNVKYAAEPLLLNVEMCDFIHDGSTVNRPNNAQEIYLKELGSESPMLVRLIMKSIHKQNKREVKHIGCKRFGIQYQLKGIYTHNGLLYFHTEIKNQSNVPFDVDYITWKIVDKKMAKRTAVQEQIILPLRAQNYATLVPGKKSERTVFTMAKFTIPDDKCLVVELNEKNGGRHQSFVIENEDLVRAGTINELQVRMRKYIAIIIASLALFTGQAHAQRCLPKMQGIEVRADMADGFNPGGKGGGYSFGAALSTYTKKGNKWVFGGEYLLKNNLYKDTKIPVAQFTAEGGYYFKILSDARKIVFVYAGASALAGYESVNWGKKVLHDGSTLHDRDAFIYGGALTLDVECYVADRIALLANLRERCLWGGDTRKFHTQFGVGIKFIINMERTEIDAVRQMPLADFLARLGYEPVRSSGNELWYIAPYRGERTPSFRVNVAKQLWYDFGLGKGGDIFTLAGEFLQSDDFMKQAKFIAEAANMTVAGWEKPVYLSKPTESVFEDVEVAPLLRSLLTEYLEERGIPYAIASRHCCRLNYGVRGKRYFAVGFPNMAGGYEVRSRYFKGCIPPKSVSLVKANDIPADEYLVFEGFMDFLSAVTLGVTGNADCLVLNSVANVEKATGMLEGYGRIGCFLDRDEAGRRTLAALTKRYGERVTDRSSLYDGCKDLNEYLQLTTKKQKNNHLKIEEKMNIQNNRNKRTNIFKAVALCLIVAVSFTLVSCDDDMDIQQSYPFTVEVMPVPNKVTKGQTVEIRCELKKEGDFAGTLYTIRYFQFEGEGSLKMDNGITFLPNDRYLLENEKFRLYYTAEGDEAHNFIVVVEDNFKNSYELEFDFNNRNIKDDGLTAISIGNFRPLLKMMRVFMTMLCSLLAVCSVSARISRQEGTDGQAAIYRLPLFERAVRCTKYFEGWHSEKHHPYVGYGHRLLPGERYSARTMTKRQADALLRKDMRNFCAMFRQFGKDSLLLATLAYNVGPYRLLGSGKIPKSSLIRKLEAGDRNIYREYIAFCNYKGKRHSMLLKRRKAEFALLYVPMAIINDKFKRARLDQSPYLFHFINGRDHSPCDTLQKILEEKQLISDKGYICFSASPITAIKRFFEVKTKSTGQPMYLPWGLGFSRDILVRDFGARNVIYTDGNEDIPEHLKWRTDILNVDSYDFEYLREWRIKGKTFNFSNFPQGEIIVIAPDINSLNHLVVKFDMKFTPYVNYYTGDIEEDWSEEFVREWKGISVDKLGVDNLLDDFAVSGATISQEIGEDMVKKLISETPWNLLTKKMIAKTILQQIGGRRFTAMTGSRDFIDMGNGLRMSLTRNKTSANRLDIIYDAGADLYNMRFYRRTFSKKTFECKEKDIAVHEGIYFDMLEEMFTMVTGLYTRFMNTTYQTLIVKFSEPITTLDGIFDDAQAWGTDTLKGWIDDYESTRFTATDSHTAVITSEYNMEWLQRQTPIAEMREFMATRMTINGVSTCTEAGTEKYERFQSGIGRRRRTLVQYDYRHTDGELFACVKPTLDECRTARNKWLNAKQGKEGNRMEVRIESMICVWDDAIPTMFIEFVNLLTLTTSEEGLRKSVKEFAEKHELDKFFLYGFGSHVANTISTCINATRATPKWMKPKTKIQKEVARLSANLRPISTTQIEWAYRHCVEHIGYRTKKGNITCSDCGHEWHSDSALCDTLEGCTCPQCHAKLKVQDTRKRIYKETQYFSVITTCKGYQVIRVMQVRCESRKGEPMHFYCHEVVQRWISPDGKVTDMALLRGFTFYYCDVWALCSAMEIRPHNSLYDDVVARSCAYPKMRVLPQLRRNGFKGDFHGISPVRLFKALLSDPRIETLMKGGEIEVMKHFLFNARTADECWTSYLIAKRHKYRIDNFSMWCDYLRMLNKLGQDLRNPKNICPEDFMAAHDNATRKIETIHEKERAEQRRRWEIERREREQQRQLQREKDAEDFIANKSKFFGLVITDEEIIIKVLESIDEYYSEGKAQNICVFGSEYYKKADTLILSARIGGEIIETVEVDLRTLKVVQCHGKYNQDTEYHERIIDIVNKNANLIRERMKVAMKGTDHFKRTIQMYLEQRAEEDTLFAKKYRNPAKNIDECVTHILNYVQKSGCSGFTDGEIFGQAIHYYEENEIEVGKPMACQVVVNHVVELTEEEKAEARQNAVRRYQEEELRKLQNRNRPSARKENHPQPSLFDLGLMAKRNSKTVAQQCRYYEVDNIFVYMVETYINGNFSTFRRLYHELNKDARRDFMDFLLSEVEPTYWREILKQTIMTATANFRQVAQYIGLAICGLMMRTAFGVFGILWGIIREIVNGVFRVAIGVIVAILSTIAYFGFILWLLTLMPDLPKKVRCAVRGVRRFFYICNYEYRMRFGIAKSEIMDLTLNLNSRLQPMHRHDLEDALQEILEKGKLGEVTGGGTLQSPQTGEIVSCDIEIHLNDDKQDSVNRLVELMNIIGIPKGSALLCTAPEIKIEVGTLEGLAFYVNGTDLPDEIYESCDINHVIEQMESAMNGIGRFYSYWEGNEWTALYFYGVSFVEMKQKIEPFIASYPLCQKSRIEQIAMRFGIAKSGMRFPLVSALTFRYLCKLYIYDSCNIDEWKSSEFNEIMRTGIVYMVATVLCIFVTSCFTGVESTKKITMPDTGEIAAQSPEDRFIESYFVQQGCDAWRIGKPFYYTDEKLSFVFRPEKPTFPDSISLKGKIFTYAGSIEESPFGGDDKVVLLFDCEGHKFRYETGKTREEIGRLKYTPLIPPFIDIDDLNMARSLLKDRVLYIKTPMWYNEKSEAIEGRKLIPVRVVDIRPGNNVLPVEVWFEDDKGNQAGVFMSLLSSSRSQYITFDRLFSFENPRLQYKEIQDDAWEQITLGKVKTGMTKAECKLSLGNPNEVKKIPTYSGLREQWIYNSGAYLFFVDDLLADYRLMIKVEENYFIKDRHTFHMPVYTKWFVEYETVEELVTLLQSDLLREHTFFPIGGGSNLLFVKEMYNGVLLHSAIQGMAVSEETDTEVLVEIGAGVVWDDFVAWTVSNGWGGAENLSYIPGEVGASAIQNIGAYGVEVKDIIHEVKAVDVETCESRTFRNAECRYGYRSSIFKHDWKGRYIVTSVVYRLQKSPELHLDYGNLRASLSGDDISIADVRKAVIEIRRSKLPEPDEYGSAGSFFMNPVIPTEQYEKLKSSYPDMPHYVVDDMHVKVPAGWLIDRCGWKGKSFGGAAVYEKQCLVLINKNNAKPNDVVALAEMIRKSVSDTYGIVINPEVNYIEMMQVTFLGTGTSTGIPQIGCTCSVCTSTDPRDSRLRTSAIVEIEGKNILIDCGPDFRQQMLRFHIKRIDAVLVTHIHYDHTGGIDDLRPFGENGTVPIYLEPSVAEGIRNRLPYCFADHRYPGVPNICLQEIGLSPFLIEGIEIVPIRVMHYKLPILGYRIGRFAYITDALTIPESEYEKLKDIDVLVVNALRKKPHLSHQTLADALRIIDRVGPREAYLVHMSHHMGLTSEVEKELPAHVHFAYDGLVIDSLMAKTIQTAIEAGSRMAPAKFYIKITPDGPYLLYGNPPMDQEIIVPNDEGSSWTYRKGNHFSTTEEPTALCRCGASKNKPYCDGSHHHTDWDPKETASHKPLLEDAEEYIGPTMVLADNEEYCAFARFCDAYGRIWNLVQTAESQEERDLVIHEAEHCPAGRLVVWDKETGEIFEPPFDPAIGLIEDPVIKVSGPIWVKGGIRIESSDGSSYEIRNRVTLCRCGQSQNKPFCDGTHVSAKWHDKLPMEQEAEVEMILGDLSDTKRVEALHPLLGKLFSYIKEHDFLSDSIGRIELDGDRVFINNDYPILRSQSEQVVEVHRRYLDVHVPLDAPEIVGWKPLCDLKEVQQAYSEEKDCAFYSDRPSTYFTVYPGQFLIVFPEDGHAPIIGEGRLRKICAKIKLMKTEKEKMLAGEPYDCGDTELINRWHKAKQLQKEYNDTPSDDIEKLSSLLDDLIGSRGENVWISAPFFVDYGENIHIGRNVEINMNCVFLDCNTITIGDYSGIGPGVHIYTVFHHTAPQERLGENSCFWKSLTKPVNIGKNVWIGGGSIILPGVTIGDGTTIGAGSVVTKSIPANCIAVGNPCKVIKDNLMETNEKQPVDLPENAFRELKPGEEYKPILSPEKVYPEVNAWSVSWGIVMAVIFSAAAAFLGLKVGQVFEAAIPIAIIAVGLSGAAKRKNALGENVIIQSIGACSGVIVAGAIFTLPALYILQAKYPELTVNFMEVFMSSLLGGILGILFLIPFRKYFVSDMHGKYPFPEATATTQVLVSGEKAGNQAKPLILAGLVGGLYDFCLSTFGWWSEVLTTRILPWGTEIANHAKMVFKVNTGAAVLGLGYIVGLKYCLIICSGSLFVWFVIIPLLGSIPGSELAAAAPEQIFTDYGRYIGIGGIAMAGVIGIIRSWGIIKGAVGLATKEFSGKNKGAIEDQAPRTQRDLSMKFIISAAVFALIITFLFFYLGVINNFMQATVAFLVVAGISFLFTTVAANAIAIVGTNPVSGMTLMTLILASVILVAVGLKGTSGMVAALVIGGVVCTALSMAGGFITDLKIGYWIGSTPRKQETWKFLGTLVSAATVGGVILILNKSYGFSGENALVAPQANAMAAVIEPLMMGQGAPWMLYGIGAILAVLLTWLNVPALAFALGMFIPLELNTPLVIGGLISWYVGSRSKDTALNKARLDKGTLLASGFIAGGALMGVVSAGMKFAGFEYTHDLSEATLQTVGLIMYLLLIAFLTISSMKAKKQDMKEILDYLSRLRENNNREWFQAHKEEYDRLRPLFVEKIQELIQQISQFDEDIVGLEAKNCMYRIYRDIRFSPDKTPYKSYMSAYIAKGGRKSLRAGYYFHFEPGNCLLSGGVWCPEPKLLKALRQAVYDNYDELKDIVENKEFKSLYRDWVGETLKIVPRPFPRDCEQAAWLKRKDYVVVNVKPDDFFGSPDWIEKAAHDFHIMKPLNDFLNYTVDEVYDLMIYPQNFEQKIGFDQIRSLIKEKCLSTLGIDYTDRMTFSTGYESIREQLNQTWEFVRILENADDFPADFFFDVRPSIKRVRIEGTFLEEAELFDLRRSLDTIQRIIRFLYPGEEEEIKYPYLYKLSKEISSFPDLIKRIDLILDKFGHIKDNASPQLAHIRSNISSTLSGISRSLNAILRTAQSEGFVDKEVSPTMRDGRLVIPVAPSYKRKIRGIVHDESASGKTIFIEPAEVVEANNRVRELENEERREITRILTSFTDELRPAIDEIIYSYEFLAEIDFIRAKALFAEEIGGVLPTFENTRQIEWFHAVHPLLYLSLKRQGKTIVPLDLTLDEKNRILLISGPNAGGKSVCLKTVGLLQYMLQCGLLVPMHDNSRTGIFKDIFIDIGDEQSIEDDLSTYSSHLTHMKYFVRNANENSLLLIDEFGGGTEPQIGGAIAEALLDRFNQKHAYGIITTHYQNLKHFAEDSEGIINGAMLYDRHLMQPLFKLSIGNPGSSFAIEIARKIGLPEEVIAAASEKVGSAYINMDKYLQDIVRDKRYWESKRQNIRQREKKLEELTARYEADLIALEKQRKELLKQAKGDAAQLLAEANARIENTIREIKEAQAEKEKTRIARQKFEQFKTELEETPTVDDKISKKLKQINDRKKRKQQKREESNLQPTAHTVLMKGDSVRLKGQNSVGEVLSVNDNEITVAFGLLKSTVKADRLEKVSKNQIKKENSKATFISSQTTDDIREKQLNFKQEIDVRGMRADEALQAVTYFIDDAIQVGCTRVRILHGTGTGVLRQVIRQYLKTVPGVSHFQDEHVQLGGAGITVVELNMEAVNSVYKEVKKMFQMAVPPYVATVNDDYHYEVWAIKKQAGESQVSEELLGYVAKHEDSVTVGFNNKLGEKIRKEAFSSLLLAKMNIHGRIRIHRMTHQLHIDLQNAIDNLMRYYTEMNWIMTQIETNNEIEDKKSLNFIEQIVEADLKAGKNGGRLNTRFPPEPNGYLHIGHAKAICMDFGIAEKFGGTCNLRFDDTNPVKEDVEYVDSIMEDIHWLGFDWGDRLYYASDYFPKLWDLAIRLIKEGKAYVDEQSSEEIARQKGTPTQPGIESPYRNRSVEENLDLFERMNKGEFEEGRFVLRAKIDMASPNMHFRDPIMYRIIKHPHHRTGTKWNVYPMYDFAHGQSDYFEGVTHSICTLEFEVHRPLYEYFVKELADDSYCPRQIEFNRLNLTYTVMSKRKLLQLVKEGLVAGWDDPRMPTICGLRRRGYTPESIKNFIQKIGYTKYDGIISVSLLEHSIREDLNKTATRVSAVLNPVKLIITNYPENKVEYLETENNPEDPEAGTHQIPFTRELYIERDDFMENPPKKFFRLAPDQEVRLKSAYIIKCTGIKKDSDGNVEEIYCEYDPDTRSGMPGSMRKVKGTLHWVSAEYSSTAEVRLYDRLFNVENPAEEKDVDFRELLNPDSLKIVDNCRIEPYLAENAKPGNRYQFQRTGYFCVDPDSTDGHLVFNRTVSLKDSWEKLKSKMSAKKPNELIDRYEEMLRGTVSCYFDTDEIDEISDYYESKGQLSKALHAIEFGLNLHPDNVDLKLKEARYMLYLDRADEAKRIMSELADYSLDATLIRAELLFIDGYMSDGHALLLAMLDNDDIREDFCFDAVDIYTDYDCFDELVEFVEKAGKVLPDSRELFREMAAICEERSEYERSVIIYNKLIDKDPYSLQDWFSLAKVEALLKHYDKAVEACDFALAVKENEESIISFKGYCYYDSGQYEKAIEQFLEYESITKEKSVAYELIGECYVKLDDNNNALKFFHKALDIEPSNSNICYQLATCYYELGDIQKAVVYLRDTLSLDSRDDEAHSFLGEILLQEGDYEEAYYHLSKSLELNEDDMETMKLKGEACLHLEYYEEAVSVFETVLREDSYDLHCRLKLALAYAKMGDDANAERQIQIIDQMSQSADFSGLPNEKSQQWKNVHGAIQSLKCFLLDHIDDSENKESLSMRIARFQFNMLPVNTYVLWDTASRECTIVDAGCYYPKEEETLAEFIDDNKLTVKYLLATHLHFDHCFGNSFVATKYGVILYAAEDDEFLLQNMARQCESFGIPFRGEIQPIGHYISDKDTFDLGHEKLKAIAIPGHSPGSMAFYAPDSGFVLSGDALFQMSIGRTDLPGGNHHQLVESIRTRLLTLPKETIVYPGHGPETEIGIEQIENPFLMQYIKTYFPNLTPKQENQFMALGQLYTDWNAKINVISRKDIENLYLHHILHSLGIAKTINFADGSEILDVGTGGGFPGIPLAILFPECKFHLIDRIGKKIKVAANVAESIDLENVTFQHGSVEENKSEYDFVVSRAVMPLPDLLKLIRKNIKKEQRNALPNGLLCLKGGELQNELVTVKKTSIVFDLKDYFKEDYFDTKKVVYVQIVKKMKKVSLLSIIALISCLYSCNFKNNHSNETNADSVVVEKLVIADTYHLSGDTAKPACKVVLTMEIPVKYKQDSDYLHLQKILSPLTFGDEYTGDSLKQAAQKVVESHVNAYKEIEPEFEKELAKSGEAYSFEWDFDYTLSPVYNRNDFFCYGISSSEYTGGAHGMYSNRYYTIDLSNWKRIGLDDIFQPDSSDTLSSILLNRLMKQLNVSSPDSLLELGYFDTEDIMATENFYLTDTGICWVYNPYEIACYATGQTSIEIPFKEIDSYILPDSPVRRLIKMLQVGKFNKLKVVKTVDFGVYLDGGEKGEILLPRKFVPEQSCSEGGEIDVFVYYDSEDRLIATTQKPYAQVGEFAWLQVKSVNRIGAFLDWGVEAKDLLVPFREQNTDMQQGEFYIVYVYLDFATGRIVASAKLDKFLDNVPPEYEANQPVEIIVTQRTPLGYKVIIDNLHWGVIYHNEIFRPITIGEHLRAYVKQVREDDKIDVMLQLPGYEKIDPLCESILQKLNEAGGVLRLSDKSPAEEIAHYFQCSKKSFKKAIGALYKARRIVIEENSIRKSMKRVFIMLAIVLGSAGLLFAQKSNQKEVKQLQSFLQQKSAKGDANYIRLGITDIKNPAMWKGVVWSDGRAISIDWKDKELAGELDLNGFTALQKVDCSRNQLTEINVSNCTALNTLNVSRNKLSELNIDNCPALVKLDCYKNRLTDLSLSGLPGLKNLNCSNNLFVELNVNGAQQLQSLNVQGCHLESLSVDSCENLKNLYCGYNKLTSLNLFGTVSLSNLNIDDNEISNMLLSKLPSLTSLICSDNNMKTLGVLDCTSLADLVCSYNDLTSLNLDGTTNLYFVDCSYNDLSTLDLSNRTMLQRLICSNNQLNVLDVSFCPNLVYINCRYNQLTDLRTIGDNNLRMIACQWNYMAEFNDKIIEMGCDFWIDTEEDAPSVVTRMTGIQPSWATTKGEIFRTRSHKEIPGKFFKQNLWELSGTAYFEKDDHLIPFKSIDMLEMIEKQKSSFQKIFRNYKYKCLLHFCYVNRHKLQFRIPPELWRRIAPYGLLVDFDLYLFSNSKKNNINRIKTGTEMGCTLYIETGKNDPGIVTEIXXXXPYTELGTHPVFDEKNVWFYDTFDNRKSSKYFDLVYQSNEILDLIESRSESFRKVFRRFKNSGLILHCSMGHYNFQFRIRPDMWKRIAKLNIPVDFYLYYISTPYFDDMGCDFWIDTEEDAPSVVTRMTGIQPSWATTKGEIFRTIPNEIMPSREIPGKFFKQNLWKLSGTTYFEKDDHLIPFRSIDMLEMIEKQKSSFQKIFRNYKYKCLLHFCYTNRHKLQFRIPPELWRRIAPYGLLVDFDLYLLSKSKKNNINRIKTGTEMGCTLYIETGKNDPGIVTEMTGMSPTRIKRKGYPDIPYTELGTHPVFDEKNVWFYDTFDNRKASNYFDLVYQSNEILDLVESRLESFRKVFRRFKNSGLILHCSMGHYNFQFRIRPDMWKRIAKLNIPVDFYLYYISTPYFNDMKKEIKGENVTNKNLVTIKIKQRKEPITGLYVNHDNNWVAVLENTYDYVLDGYTFINREWIDHFHIETDRIADYIFSNSKWELINSTLLFPPALFDKDKEKLVEIWQHKAHKFWLGEIKNINEQYITMRILDKQAQWIGYKKFPLQKIRFFRVNTRYSCAYQKYITTDSTKIPRLEIWEIKVNNHNEIYKGVVIQENEEWIILHQSQRDFNFDGYLFINKNFIKQKNIVSTDRISAKILSLNYSPMWKYEGKGIDCTNTMHIFSTFMEKKENIAIGLESDDYILVGKISKINRKSIVLNKIDEQTNFIQSQRIPFSKIRLIEYKNNYLTSLSKYENLFASIDMGTQKIEIGDIFEVPTAIGNAYIQYMAEVDQTTLIRLLPGVYHEPVDLEKLVQQKERYICFVPLGIALRRKYIRKVGFSEVKKFKVPKYFKTVETVCGVFKGWVIVNNHTLERKLVKKPTKKQQKYPPYGIWGIEFLIDRIEKNWNPETWEDEYTEQESMGCDFWIDTEEDAPSVVTRMTGIQPSWATTKGEIFKTRYHKEIPGKFFKQNLWKLSGTAYFEKDDHLIPFKSIDMLEMIEKQKSSFQKIFRNYKYKCLLHFCYTNRHKLQFRIPPELWKRIAPYGLLVDFDLYLLSKSKKNNINRIKAGTEMGCTLYIETGKNDPGIVTEMTGISPTRIKRKGYPDIPYTELGTHPVFDEKNVWFYDTFDNRKASKYFDLVYQSNEILDLVESRLESFRKVFRRFKNSGLILHCSMGHYNFQFRIRPDMWKRIAKLNIPVDFYLYYISTPYFDDMIEVNNISKSFDGKVILHNVSAKFYSGKTNLIIGQSGSGKTVLMKCIVGLMQPDKGQVIYDGRDITSMSASQIKELRNEIGMLFQGSALFDSETVLGNVMFPLRMFTRDTYAACKKRAEFCLERVNLKGVNDLYPSEISGGMQKRVAIARAIALNPKYLFCDEPNSGLDPKTSILIDELLSDITHEYNITTIINTHDMNSVIGIGENIVFINKGHREWVGNRAKIFTSSNEALNDFVFATRLFKEVKGYMIEEYRKHESADEMIIQDSLKKFGDYVLLMRRVFTIPDRWREFFKRYISEIYKLGIDSIPIVITISVFIGAVIAIQMQKNVVSPMIPAYAVGLATRDVILLEFSSSILCLILAGKVGSNIASEIGTMRVTEQIDALEIMGVNSANLLILPKIAAMVSFIPVLVVFSMASGITGGFLIAQFTDIISVSKYIYGLQSFFNEYYIWQAIFKALFFAFVISSVASYYGYKVKGGALEVGQASTDSVVVSSVIVLLLDVVLTQILFMENIFLPLKLSAKIVKGKRRGKRKLHFRLDYAKPHSIFTETKILKIDNPISRFNEIKMAANTEEKVHLNVQSDLESSENNMVLRTEDLVKKYRQRTVVNHVSIDVTQGEIVGLLGPNGAGKTTTFYMTTGLITPNQGHIYLNDLDITDYPVYKRAQIGIGYLAQEASVFRKLSVEDNIRCVLEMTHTTKEYQRDKLESLIAEFRLQKVRKNLGDQLSGGERRRTEIARCLAISPKFIMLDEPFAGVDPIAVEDIQSIVYKLKEKNIGILITDHNAPETLSITDRAYLLFEGKILFQGTSEELAENPVVREKYLGRNFIFHRKKFLMRISGYCHNSSTGIKLIILLLLILWGALIVAIPMFFVKGSNALLIAMYLQNIGMFILPAWIAATLFWGNAGKSLYLNKAPRIIELLGIIALFIVATPALNRIVEWNEAMHLPEALYNIEQWMRQQENAATKITEQILQVNSFSHFLAVIFGIGILTGIGEEMIFRGVLQRIVQDKNHRAHVAVWICAFLFSAIHLQFYGFIPRLLLGAFFGYLLVWSKNLWLPIFAHLFNNSTVACISYFTNDKSPDNLIETVGTSGSPTSWLAGASLIGTVILLYVLYKKVFFSKSKEFFPMEDKITPMSLKYAVVWQLFHILRKGSKNKYKDSLSKEKEYKQYVRVLSIMKVSIIKYNAGNVYSVECALRRLGVTPVVSDSPDVLSQSDKVLFPGVGEASSAMKYLQEHGLDRVIVDLTQPVLAICIGLQLLCKHSEEGDVDTLGIFDTVVRRFVPEDTEQKIPHMGWNALTCLKGPLFAGIPEGSYAYFVHSYYAPVSAFSVAECNYVIPFSAALNKGNFYATQFHVEKSGTVGMRILENFLSLMIELIPAIDIMNGRCVRLSRGDYSCRKVYDENPLEVAKAFQDNGLNRLHLVDLDGAKADHVVNYRTLEQIATHTTLSVDFGGGIKSDEDLRIAFECGADMVTGGSIAVKNRSLFLQWLDRYGKEHIILGADTRDGKISINGWLEESEWELIPYVREYAQAGVYKVITTDISRDGMLEGCAVNLYESMLSEIPEIYLIASGGVASWNDIESLQSIGVPAVILGKSIYEGKILLSEISRFVAKNQSYVGMLAKRIIPCLDVKDGKTVKGTKFVDFKEAGDPVLLGEIYSKEGADELVYLDITASSEGRSTFTDLVKRVASRIDIPFTVGGGVNSLQDIDRLLNVGADKVSLNSSALKNPQIIDDVAKKFGSQVCVIAIDANFENGNWVCYSNGGKVATQRTLFEWALEAAERGAGEVLFTSMTHDGTRSGYAHEALLELHRLLPIPIIASGGAGTKAHFKDAFLRGKADAALAAGVFHFGEITIPELKKYLSESGIPVRRMEKETIQLDFEKMGGLVPAVVQDDVTQKVLMVGFMNEAAFHKTLDTNRVTFFSRTKGRLWIKGEQSGNFLEVKSILPDCDNDTLLIKATPCGPVCHTGTDTCFGEKNEDALSFIGYLQDFIERRKQEMPQGSYTTSLFQSGINRMAQKVGEEAVETIIEATNGTDDRLIYEASDLLYHLIVLLTSKGHRIEDLVRELQKRHQMEKKLLVKYTDVQICREELTILKHINFELYSGEFVYFIGRVGSGKSSLLKTMYADLPIYEGEAIVLDFDVRHLKNKEIPNLRRKLGIVFQDFQLLTDRSVYENLAFVLRATGWKDREEIDTRVSEVLDQVGMRKKSYKMPHELSGGEQQRIVIARALLNSPKIILADEPTGNLDPQTGQQIVSLLHHICETGTAVIMTTHNLNLVEEFPGRILKCEDKSLVEVMKVLKFGGTSVGSAQCMKDVAKLICDGNRKIVVLSAMAGTTNTLVEISDYLYKKNTDGARETIGNLERKYNKVIDELYSTDEYKQKTLEVIKGCFDHIRSFTKDLFTLFEEKVILAQGELMSTAMMNNYLLEQGVKSVIIPALDYMRTDKNSEPDNQFIKNKLLSLLQESPDAEIYITQGYICRNAYGEIDNLQRGGSDYSASLIGAAINSEEIQIWTDIDGMHNNDPRFVENTKPVRFLQFEEAAELAYFGAKILHPTCVLPAKLNNIPVRLLNTMQPEAPGTLIYDHSSDGQIKAIAAKENITAIKIKSGRMLLAYGFLRKVFEIFESYQTSIDMVTTSEVGVSLTIDNTKHLQEILDDLRKFGTVTVDEDMVIICVVGDLEWNNVGFESEAVQAMKDIPVRMISYGGSNYNISFLVRREDKVKALRSLSHYLFENKMFPISHFNITRTPFYYYDKTLLSNTLAKLIRLAGERNYHVHYAVKANANPEILKLIAASGIGADCVSGGEIKAALEAGFPAKKIVFAGVGKADWEIEYALEKKIFCFNVESAEELSVIEELAKKKENIASIALRINPNIDAHTHEYITTGLSENKFGIPIEMLDSIFSQIQRSPHVQLVGFHFHIGSQILNLETFHVLCERINQLQDDLSKRNIQVKHINVGGGLGVDYENPDKNPIPDFGRYFDIFQHNLNLRGGQQLHFELGRSIVCQCGSLITRVLYVKKGIEKQFVIVDAGMTDLIRPALYQAHHCIENITSDMEKCRYDVVGPICESSDCFGKDVMLNETKRGDLIAIRSAGAYGEAMASQYNCRTLPGYLIEMKESAQNRLRRYNIKPSVQRMAVLDYLMTHHTHPTADTIFNALYPSIPTLSKATVYNTLNLLTEHGVIQMITIDEKNARFDARETPHLHFKCASCGEIFDFDLPPLQIESLKDYDISDIQVYCKGTCPTCQKKTQHMKKFICTVCGYVYEGDEAPEFCPQCKQPRSKFKEVVESDELDFVTEHHIGDGVVEDAEVMEGLKAHFMGECTEVGMYLAMSRQADREGYPEVAEAFKRYAWEEAEHASKFAELLGEIVWNTEKNLKARMEAESGACADKMRIAKRAKELGYDAIHDTVHEMAKDEARHGKGFEGLYNRYFKKMKNIRNFCIIAHIDHGKSTLADRLLEYTKTIADKDLQDQVLDNMDLERERGITIKSHAIQMEYIYKGEKYILNLIDTPGHVDFSYEVSRSIAACEGALLIVDASQGIQAQTISNLYMAIEHDLEIIPVVNKVDLDSARPDEVEDQIIDLLGCKREEIIRASGKTGQGVEDILSAIIERVNPPQGDVDAPLQCLIFDSVFNSFRGIIAYFKICNGRIKTGDKVKFVATGKEYEADEIGVLKLDMVPRKELSAGDVGYIISGIKTSREVKVGDTITHIERPCSSAIDGFEEVKPMVFAGVYPIETEDFENLRASLEKLQLNDASLTFQPESSAALGFGFRCGFLGLLHMEIIQERLDREFNMDVITTVPNVSYKVYDKKGAMVEVHNPSGLPDPTLIDHIEEPYIRASVITSTDYIGPIMTLCLGKRGELVKQEYISGNRVEIIYDMPLGEIVIDFYDKLKSISKGYASFDYHIHDFRESKLVKLDILLNGESVDALSTLTHVDNAVTFGRRMCEKLKELIPRQQFEIAIQAAIGAKIIARETIKPVRKDVTAKCYGGDISRKRKLLEKQKKGKKRMKQIGSVEVPQKAFLAVLKLDMDSLYAIKKSIKNYASGGNVLIVATLLAFIIANSPIADMYFSWWAQPISLQLGDFNLFSHNGHPMTVMEFINDALMAIFFFSIGLEIKREVLVGELTSIKQALLPIVAAIGGMVIPVLLFMYIGRGSDFLRGSAIPMATDIAFSLGVLAMLGKRVPISLKIFLTTLAVVDDIGGILVIAIFYSSHISVTYLFYAAGIFLILWLGGRAGINSKMFYFILGGVVWFLFLNSGIHPTIAGVLVAFCIPAKPVLATTRFISTIRDEIANFPQEQFHGDSDSSIMLSKDQINCLKSIESASDKVISPLQDLEDTLHPVINYLIIPLFAFANAGIVLSGIELSSLFTGISLAVFVGLLFGKFVGIFFSSWLIIKLKIVPMPTHSTWKSLAAVSVLGGIGFTVSLFIANLSFGNMGPEGIELLEHAKLGIVMGSLVSGILGYILLNLFLPKQQEVEMNNWKLYIANRIHFDKQHRKKATPPAVRVAVAGVALGLAIMILSVAIVIGFKKEIRSKVVGFGAHIQITSFDNNMTYEKQPIQYTDSLREILSECDGITKIDPIGTKLGMIKTDTDFMGTVLKGVTPDYNWSFFKKYLVDGCLPKIQDSIISNEVLVSKTIADKLDLHIGDKIYCYFVQEQVRARRFSISGIYQTDFSDYDKLLIIGDVRHIQRLNDWNPDQYSEIELMVKDFDRADDIAYELYTQLIDRPDDYGTHYYPQSIRTLNPVFFGWLDLLDMNVWIILILMAAVSGFTMISGLLIIILERANMIGILKALGANNTSIRKIFLYVSVFLVGKGMIWGNIIGVVLCLIQRHFHIVTLNPEAYYVPYVPIEINFWYVLWLNIGCMLVSVLMLIAPSYLVALIRPAKSIKFEMPTISHRGEVMPASPIRKLVPLANKAKEKGIKVFHLNIGQPDLPTPQIGLDALRHMHRRILEYSPSEGIKSLREKLVQYYDKFHIHVTADDIIITTGGSEAVLFSFMACLDPGDEIIVPEPAYANYMAFAISAGAVIKTLPSSIEEGFALPSIEKFESLITPKTKAILICNPNNPTGYLYTQREMNQIRDLVKKYDLFLFSDEVYREFCYTGAPYISAFHLEGIEEQVVLIDSVSKRYSECGIRIGALITRHKELKKSVMKFCQARLSPPLLGQIVAEASIDAPESYMLSTYNEYVERRKHLIDGLNRIPGCYSPIPMGAFYTVARLPVDNADKFCEWCLSEFEYEGQTIFMAPASGFYTTPGLGKNEVRLAYVLEKEELSKALIVLQKALETYPGRTINEMNDLKHLFLLIVSPGKTWQKMDKVPYATQIFLNQFLYPLMGITAIVSFLGHFFNDASLPRALQLAIVEFVKFFAGFYALVYVMKIFSTYMLEVLQPESRIKRFVGYTLALYMLFDISIFVIRLFIELPSIVDFLPLLLAYVIWNSQRYMEIPDQKNILYVVATTILFLVIPLSIQKLLYFLMPGLIMKLPQINIKNKRASFDYELLDTFHAGIVLSGTEIKSIRLGKAGLTDSFCYINNGEIWIKNMYIAEYFYGSYNNHSSRRDRKLLLTHKEIQKIERAAKESGFSIIPTRVFINEKGLAKVVIAIAKGKKEYDKRDSIKEREDKRQMDRMFKRMYQKSIQNFILEYSDFDTNKLRLKNIQADFDVAWAIQQIEARKKIRDKLPTWASNMNIVFPSILSTEQCSSELTARYKQNLIIPGDTVDLTGGLGVDSFFFSQKSDHVVYVEQLAEYCRAAKQNFKNLCTDNITVTHDDCINFLQNNDRHFQNIYIDPARRGSCNKRIFAIDECEPNVIELMPILFQCGKRIIIKVSPMVDITATLSLLPDISEVHVVSVKNECKELLLVIDTESEKSSDRDTIIHCIQINSFDNISDFTFGIKQEKGLPYSTFCKSIKKYLYEPNTSILKAGAYKSIAIEYDIEKLQANSHLYTSDNYISNFPGRKFEIIETVTFNSKNIKDIKTKYPQTNLSTRNFPLTTAELQKKLKTKDGGDLYLFATTLSNDNKVLIICKRATNAMKKTTLTVVLLLSIICAFGQKKAVNRAFSEAKMEKPNFQEARDNIKGALTNPETKDDAKTWYVAGFVENSYFEKDNVQKTLGMTLKDGDGPMYDALVKSYEYFLQAIALDTLPNEKGKIKPRYVKDIRKTLKQNIDGYANAGVYYFTQKEYKKAYDVWGIYLNIPKMSIMKGEKEGLPADSTLAILEFNRALAALQTNDTTLAIKALNEAKGNGYNQNDIYKYLVYEYEMTQDTANLIKTLQEGEKLFKNEMVEVKDENGNTKMQKENTYTLKLINLYIFSGKYDEAIATLESVLADEPNNAEYWNVKGNLYESQKKYDQSIECFEKAISINPSYADALGSIGRVYFNLAVQKNNEISTITDNAKYTEAREKEVLPLFEKSRPYYEKAYELKPDEPDYKYALRNIYYNLNDAEKLKAIEGQMIDQDRILKIDIKQEMQSAYIDYSMSVIVARALPDVRDGFKPVHRRVLFGMDKLGNTSDKPYKKSARIVGDVLGKYHPHGDSSVYFALVRMAQPWSLRYPLVDGQGNFGSVDGDSPAAMRYTEARLSRIAEEMLRDIEKDTVDFTPNFDNTLEEPTVLPTRIPNLLVNGASGIAVGMATNMPPHNLSECIDASVALIDDRELTVEDLMQYIKAPDFPTGGIIYGFAGVKDAFETGRGRIVIRAKAEIEVDSTTGRETIVVSEIPYAVNKSELIKKIADLVEEKRLEGISNINDESDRAGMRIVIEVKRDANASVILNKLFKMTDLQSSFSVNNIALVNGRPQTLNLKQLLEAFVDHRHEVVIRRTRFDLAKAEERAHILEGLIIASDHIDEVVKLIRSSRTREEAKTRLMERFSLSEKQAQAIVDMRLGQLTGLDQDKLRNEYAEVEKMIAYYKEILADESVCMKVVKDELLEIKEKYGDERKTEIIYSSEEFNAEDFYADDEMIITISHMGYIKRTPLSEFRAQNRGGVGAKGSNTREEDFIEYIYPASMHNYMLFFTQKGKCYWLKVYEIPEGAKNSKGRAIQNMLNIESDDKVNAFIRVKKLQDPEYNMSHNLLFCTRKGVIKKTKLEAYSRPRQNGVNAITIREDDQVIQVRLTTGDSQIIIANKNGRAIRFHESAVREMGRNATGVKGMTLDDNGDEVVGMICVNDPEKETIMVVSEQGYGKRSLIEDYRITNRGGKGVKTLNITDKTGCLVAIKCVTDENDLVIINKSGITLRMKVADVRVMGRATQGVRLINLEKRNDEIASVCKVLSESVDENLQDDNVTEVAEMERNFSQHVKEILGYSREEAERLQNSNIVPEHLLLGIIRDGANRAVDVLVGLGASLRTLKSSLENELSASNNHMEQTNELTISKSTDRVLKMSMLEARFMKSSETDTEHLLLAILKEPDSSAAKILNTNDITYDEVAAFLKGNEKPDFPSPSMGAGFTDDDDDELEEDRNYRREQQSGNSTTAQRSNNETPVLDNFGTDMTKAAEEGRLDPVVGRENEIERLAQVLSRRKKNNPVLIGEPGVGKSAIVEGLALRIVQRKVSRVLFDKRLVSLDMASIVAGTKYRGQFEERIKAILNELSKNPNIILFIDEIHTIVGAGGATGSLDAANMLKPALSRGEIQCIGATTLDEYRKNIEKDGALERRFQKIMVEPTTPEETLQILNNIKGRYEDHHNVTYTDDALEACVKLTDRYISDRNFPDKAIDALDEAGARVHVSNIIVPKEIESLEAQIETCREDKINAVKSQNYELAASFRDKEKELQLSLESAKANWERQMQQHREIVNEEKVAEVVAMMTGVPVQRIAQAEGNKLLAMSGELKREIIGQDDAVDKIVKAIQRNRVGLKDPGKPIGTFMFLGPTGVGKTHLAKKLAEYLFDSKDALIRIDMSEYMEKFTVSRLVGAPPGYVGYEEGGQLTEKVRRKPYSVVLLDEIEKAHPDVFNLLLQVLDEGRLTDSLGRRIDFKNTILIMTSNIGTRQLKDFGQGVGFSTNTVSEKDYSRGVIQKALNRAFSPEFLNRIDDIVMFDQLDKESIFKIIDLELSGFYKRVETLGYHLTITDDAKNFIAEKGYDIQFGARPLKRAIQKYLEDKLAEMIIRATVQEGDTIVVDFDKENQKIVSSIHNSQTKMQKGTIGVTTDNIFPVIKKFLYSDHEIFLRELVSNAVDATQKLKTLSSFGDFKGELGTMNVTVSIDKNKGTLTISDRGIGMTAEEIDKYINQIAFSGAEEFLEKYKNDANAIIGHFGLGFYSSFMVSKKVEIRTLSYKEGAQAVMWSCDGSPAYEMTDIEKSERGTDIILYVDDDNKEFLEEQRIETLLKKYCRFLPVPVVFGKEQEWKDGKYVDTDKDRVINDMEPAWTRKPTDLTDEDYRKFYADLYPGIDEPLFWIHLNIDYPFKLTGILYFPKIKNNIDINRYKIQLYCNQVFVTDSVEGIVPDFLMLLQGVIDSPDIPLNVSRSYLQSDSNVKKISGYITKKVSERLQEIFNSDHKQFEEKWDDLKIFIEYGMLSDEKFYERAQKFVLLKDTEDKYYTLDEYKKLIEGNQTDKDGQLVYLYATDKEAQYSYIDTAVSRGYDVLLMNGQLDPHFIGMLEQKLEKSRFVRVDSDLIDKLIKKSDTTSNTALDEQQRDMMTSVFKSQIPAMEKSDFLVMFEPVGATAQPIVITQNEFMRRMKDMAAIQSGMAFYGELPDSYNLIVNTDHPLSQKVIADTESACKSELTPILDELKTVNEEIERLQEAKKDKKDDEIPVADKEALKHAEEKAKELRAKESDILKTYADRTPLVRQLVDLALLSNNMLKGEALSKFIKRSVEMLMADLKVNIGGLLLKNPVMTASGTFGYGEEFADFVDLSRLGGVIVKGTTLHHREGNPYPRMAETPSGMLNAVGLQNKGVNYFIENIYPRIKDIDTHFLVNVSGSSIEDYAVTAEKIAALDKIPGIELNISCPNVKEGGMAFGTSCQSAAAVVKAVRAVYPKTLIVKLSPNVTDITEIARAVEAEGADAVSLINTLLGMAIDSNRRRPVLSTITGGLSGACVKPIALRMVWQTYHAVKIPIVGLGGIMNATDAVEFILAGASAIEVGTANFIDPQITEKIADGIDEYLDRNNIASVKELIGGLICNMKKYILDFRVVENTKLHDNYALLKLKPDNNEPLPDMLPGQFVEVRVDRSPGTFLRRPISINFVDSTRNELWLLIRKAGEGTRTLCDLKQGDSINLVLPLGNTFSLPDETDSNILLIGGGVGIAPMLYWGKYLKERNYTPKFLLGFRSDKDILQYEMFRQFGDVYISTEDGSLGEKGFVTQHSLLNSKLDKLYVCGPKPMMVAVARFAHERNISCEVSLENMMACGVGACLCCVEDTIEGNTCVCKEGPIFNIEKLKWQIMVNNEGYLRSIPHVVLFAFVNYIIYKTNLRFLFILVTFVNYNFIITNLFTPLKMEENEALIVAERMKSFIEYKGISVTQFADATKIQRSSMSQILGGRNQKISINTIGKIHSAYPDLSIYWLLYGTGPMILTTAIPPAENITSPSKEFSTSLFPEENEIKPDEYTAPSKYSRENDSNIHQKQDHKLENEEVTNLKAPFFEPSEQVVKNKKVTKIMIFYSDNTFETFSPDNEMYLCTWWICKCNTPTLYELQIFILCNCVLRVTFVNSGCKLQMMGDRQKMKAEEQIEVYGARVHNLKNIDVNIPRNSLTVITGLSGSGKSSLAFDTIFAEGQRRYIETFTAYARNMLGGMERPDVDKITGLSPVISIEQKTTNKNPRSTVGTTTEIFDFFRLLFARAGEAYSYLSGEKMVRYTEEKIISLIMDLYQNKKTYILAPLVRNRKGHYKDLFEQVRRKGYLTVRIDGELREITHGMKLDRYKNHSIELVIDKLIVDKDDERRLQESVKTAMKQGDGQLMVLDAETQEIRHYSRTLMDPQTGLSYSEPAPHSFSFNSPQGACPKCKGLGYVNIIDKNKIIPNDEKSIYEGGIVPLGKYKNSLIFWQIAAICEKYDSSLKTPIKNLPEEALDDILNGTDERLQIKNESLGTSNYFLSFDGLIKYIEIQQQSDASSQAQKWAGQFVTTATCPLCEGHRLNKEALHYRIAGKNIADLADMDISELYEWVNHVEEYLSPQQRKIAAEILKEIRNRLHFLVDVGLDYLSLNRASATLSGGESQRIRLATQIGSQLVNVLYILDEPSIGLHQRDNTRLIQSLKELRDMGNSIIVVEHDKEMMLEADYIVDLGPRAGRLGGNIVFAGTPKEMLKTDTLTARYLTGKKEIEFAPQRRTGNGKKIILSGATGNNLKNVTVEFPLGKFICITGVSGSGKSSLINGTLQPIISQKFYRSLQNPLPYEKIEGLENIDKIVTVDQSPLGRTPRSNPATYTGVFADIRNVFVELPEAKIRGYKPGRFSFNIPGGRCEVCGGNGYKTIEMNFLPDVLVPCEACHGKRYNRETLEVRFKGKSIADVLDMTINQAVEFFENIPSIISKIKVLQDVGLGYIKLGQPSTTLSGGESQRVKLAAELSKRDTGKTLYILDEPTTGLHFEDIRVLLSVLNRLVDKGNTVIVIEHNLDIIKCADHIIDMGPEGGKNGGYVLTTGTPEEVCVQNTFTARYLKAELKVMTSNRYFFIVLLFLYTLLFIKGYANTTKEFSDVIVPEFPLQVKFANELVDLDRLDMYERFDRELTTLCYMHSSTSLAIKRANRYFPILEPILKEEKVPTDFLYLAVIESTLNPKAVSPAKAVGIWQIMPRTGREYGLEVNNDIDERYHIEKSTRAACKYLKDAYEKYGSWTTVAASYNAGMGRISTELEKQLADRSFDLWLNEETSRYVFRILAMKEIFSSPAKYGYKLKAKQLYQPIRYSEIKVDTTINNLAVFAQSKGVSYAQLKEANPWLRSRFLPDKSRKVYYIKIPMKDDLYYTKRKFTTYKKEWVIDKKMRRYLLFFACIITIGELYAQQITVSGGGRPAYNHTPEISTGLTGGVFVIYSLNNATIEFSGEDDSPISWRLFRENGAASSTPISGAIQNGNISTLNISEADCGYIIEQNGESYYLWIIDYSQSPLILNAVSTSNEEGQCDMTTLMLDGEGKKLNYYSINGAPKSLRRELTVSYMSLTWDKESLAYTQTFQTETVYDFSSSIQVPSPLCNTDFTVTGDQILNYWGLSQTASTEEYITSAIGATATAEQTYREDATNEDDRHPTDYLGGSAPAEIEFKAYVTDAVTHIEWEFSDKEDFSNTIARYNDETLWYTFRDEGVTYVRLVASNSTATCQAYSETFTINIGEPRLEAPNIFSPGTSPGVNDEWKVAYKSIVSFKCWIFNKWGVQMFYFDSPDQGWDGKYRGKYVDPGVYYYVIEAKGANNKKMKLKGHINILRPKNMKYTRITIALLFCFAFTFLLSAQTENLQTKIIDGKEFYIYKVKPSEGFYILSHKFGISQEEIIRYNPAAKNGLKKGQLLMIPTNKGVNKPDSEPEIESTFEHTIVRGESLYSISKTYKVPIRSIIALNPGSERGIKAGATLKIPQRYQKPEKQSIPLVQKDTQTAMNTADSEVLEDSLNGTSNEYVYHTIVDGETLFSISKRYDVDIEIILKLNPGISPTHMKKGSVIRITPDTKELNVTIEPKQLYTEYKVRKKETLYSISKKFGTTVEEIKKCNPNIKQIKQDDIINIPAGIEYNTVTAENPITSAEINNIYNKLYKSDKKGVINVAVILPFMLRQSSLDTKASLYTEYYQGFLMAVDSLKRQGASINVYAYDSEESEPTVRRILSDPILKEMDLIIAPENDSHIKLIADFGLANDINVVNTFSLKNEEVSHNAKVFQTNIPHSYLYAEAADRFIRYLGNRKVVFLSHTPEEPDKRDFIGGLKEELDRAHIAYHEIKFGNELNLLDQDSILADASGIVFVPTSAKKKVLSLIVAPIESLKEKRADLDIALFGYPEWLTQVPEYLNEFYKLNTYLYSRFYANPFEEDTKTFHKRFLYWYNKDMINASPQYALLGFDTGIYFLSAIREHGKNFASQDIRPSIDRIQTDFSFQRVNNWSGFINKSFYFINFTPNFTIRKIRDMKLLRYILFVIAVVSLQSGLAQRSDYQPEFTVGVKGGTTLSRVSFTPTVTQSLLLGYTGGVSVRYIEEKFFGLIAEINFTQCGWNETFEEDPYTYTHTLNYVTIPFLTHFFFGNHVVRGFVNAGPQIGLLLGDSYKSNFDIYNLPEFSQKSKVKEIYTMDIAHRFDYGITAGAGIEFRIKKTHGIVLEGRYYYGLGDIFKNRKKDVFAASHSQIITVSLGYLYHFMAKKDTNQHLAILQDIRNKVFKPVYLLMGEESYYIDLICETIIENALKDSERDFNQTILYGADIDDFAIVVNAAKRFPMMAERQLIVVKEAQNIKGVDNLLYYLQKPLMSTILVICHKNGSLKNKKVVAGIEKIGVVYESKKLYDNQLPAFINNYVVAKKLSIDPKAASMMADFVGNDLSRLSSELDKLSISLPEGSLRITPEIVERNVGISKDFNNYELLNAIITRNILKATQIIQYFEQNPKNNPLVVTISVLFNFFSNLMLCYFSTDKSENGIMNELNLRSSFQSRDYLTAMRAYNAFKCIDIIALIRQYDARSKGIGSGASSNDGDLLKELVFKIMHMKTKQEIVENWLPRYTQRPVKDFTKYILLTNFSKYVEIFATHFHVPILGEDSNMPSASADGVTIINFGMGSANAATVMDLLSAVKPEAVLFLGKCGGIKKVNKLGDYILPIAAIRGEGTSNDYFPPEVPALPAFMLQRAVSTAVRNHHRDYWTGTVYTTNRRVWEFDDNFKDYLRRIRCMAVDMETATLFSVGFANQIPVGALLLVSDQPMISTGVKTEESDKKITRDFVEEHVLIGVEALKLIIDKRTTVKHLRFDEEMIELNLPPYPYKVKQEKDKILIFDELRRRYVTLTPEEWVRQHFVAYLVNQKEFPRGLIGNEISLTLNKCNRRCDTIVYDRNGNPLCIAEYKAPHVEITQKTFDQIVRYNLVLQVSYLFVSNGMKHYCCHINYTTNSYTFLPDIPLYKDLMGYPQHARLVGRALKLVPKNLNIPCHRVVNCQGRLVPDWIEQKELLSREGILFTPKGYVDMKRFAWRFWDMDKQTFLSSYEKDGYQVIDSFIYDDIKTFLERNKPRKNHIIWIVFISGFFILFFIGFAMGKLWSDSLSFSQFGIQILKCVVFSILGCALIIPVHEFIHWIAYKKEGANDVRFGAIWKSFVFYAAAHNFAADYKTFRRIALAPFYILSVLLILLLLSPVPLWGKISIAAILLFHIVSCSGDLSMLSYMKRYKRRNVITVDDIDNRFTYFMEKMRLSDLQTGDKAVVVKVLGYGAFRKRIIEMGFVRGQTVLVELNAPLKDPIKYKIMDYEISLRRSEASLVEVITPEEANQLENRQGGKNKLNVENWKTEEDDCIERALTQSSKTINIALVGNPNCGKTSLFNVASGAHEHVGNYSGVTVDAKKGFFEYKGYHFNICDLPGTYSLSAYSPEELYVRRYLKNEIPDVIVNVVVASNLERNLYLTTELIDMDYRMVIALNMFDELEQSGGKIDYKHLGNMIGVPIVPTVSRSGKGVNQLFDTIIEVYEGRDESVRHVHVGLGKVIENSITPLKDLLKKDPTCNREFSPRYLAIKILEGDTEVKRMLEGSESYPELMNIRNAEVEKIETTLNEDIESAIANEKYGFISGALAETYRPGDKEEAKTTRIIDSFVTNKLFGFPIFIFLMWLMFEATFSIGAYPMEWIENGVAWLSEIIGNYMPSGPLKDLLIDGILGGVGGVIVFLPNILILYLFISFMEDSGYMARAAFIMDKIMHKIGLHGKSFIPLVMGFGCNVPAIMATRTIESRSSRLITILINPFISCSARIPIYILLVGTFFPQYASLVFIGLYLFGIIVAVITAKLMRRFFFKVDETPFVMELPPYRMPTAKATFRHMWNKAEQYLRKMGGVILVASVIVWFLSYYPRPKASYERELTPHEQMEQQSNSYLGKIGQAVTPLVEPLGFNWKVTTSLLSGTAAKELVVSTLGVLYSESDADETISLSQKISQPNPVTGIPDFTPLVALSFMVFVLLYFPCIASVIAVAKEAGSWKWGAFTVLYNTGVAWIVSFLVYQIGLLIIMTEIIKHECGIAMVRLLKPLSYYQKKYGSYLYGLNKLYLLMEKQHNRGQEGAGLACVKLHARPAEEFIYRERAIGTSAIQEIFANIKDQIKNTPHDTADADWAALHLPFAGEVYMGHLRYSTTGRSGLSYVHPFLRRGNWRSRNLLLCGNFNMTNVDEIFNSIVAQGQHPRSYADTFVLLEQVGHALDMENQKLYDRYKKEGLDDIAITKSIEENLNIADILKKPARIWDGGYVICGMTGSGDMFSFRDPHGIRPAFYYADDEIVVIASERPVIQTTMNLSVEQVKELQPGECLVVNRRGNIHTEQILPPRNYSACSFERIYFSRGSDVDIYKERKELGRYLTSQILESIDYDLEHTVFSFIPNTAEVAFYGMLEGLNNYLSEQKFYMLRNATAPLNDSELKHILSLKVRSEKVAIKDIKLRTFIAEGDTRDDLAAHVYDITYGTVQADIDNLVIIDDSIVRGTTLKQSIIKILDRLHPKKIIIVSSSPQVRFPDCYGIDMSRMGEFIAFKAAIELLNDRGMQHIIEDVYNKSKAQQNSPKEQITNYVKEIYAPFTQEEISKKIAQMLTSEDITSQVEIIYQTLEGLHQAIPNHPGDWYFSGNYPTPGGNRLVNNAFINFVEGVDNKRQLMSMLRFKVAKEAFSRKAVPVNEPKERPSEYFGKYVFNREKMFKYLPKKTYEAVIEAIDNSTPLSREVADSVAAGMRKWALEMGATHYTHWFHPLTDGTAEKHDSFIEHDGKGGVVEEFSGKLLIQQEPDASSFPNGGIRNTFEARGYSAWDISSPAFILDKTLCIPTIFISYTGESLDYKTPLLKALNSVNKAATAVCGYFDKNVKHVYSYLGWEQEYFLVDESLYAARPDLVLTGRTLMGHESAKNQQLEDHYFGAIPSRVEAFMQDLEIECHMLGIPVKTCHNEVAPNQFEVAPIFEETNLANDHNLLLMSVMREVARRHNFRVLLHEKPFKGVNGSGKHNNWSLGTDTGVLLFAPGKTQKENLQFITFIVNVMAAVYKYNGLLKASISSATNGHRLGANEAPPAIISIFMGKQISEVLEKLAESTSDDVLNMSGKSGLKLDVAQIPEILMDNTDRNRTSPFAFTGNRFEFRAVGSSANCASAMIALNAAVAYQLQDFKKKVDALIANGKEKTQAILSVVKDLITESKDICFDGNGYSEEWKEEAKRRGLDCETSVPLIFDCYLKDDVVKMFEQTHVFTQVELQARNEVKWEIYTKKIQIEARVLGDLAINHIVPVATRYQSLLLDNVFKIKSLFPAEKSELIATQDMEVIEKIAFHLLTIKEKVHAMVEARKVANKIENEREKAIAYHDTVAPQLDDIRYHIDKLELMVDNEMWPLPKYRELLFIRMALINENFLKLPESYLFSDIKKKVEAFKHLHPDANIISLGIGDVTRPIAPVVIEALHAAVDEMGDSKTFRGYGPEQGYDFLQKKIIENDYIHRGVDLAPDEIFISDGAKSDIGNIGDILSMQNRVAVTDPVYPVYIDTNVMGGRAGNIAKDGQHWDNIIYIPCTSENNFIPEPPSVRPDIIYLCYPNNPTGTTLSKNELKKWVNYALENETLILFDSAYEAYIHDEGIPHSIYEIKDAKRVAIEFRSFSKTAGFTGLRCGYTVVPKELKLYDTSKKRININRLWNRRQTTKFNGASYIVQRAAEAIYSPVGKIQIQESIDYYMRNASLLKDCLQKVGLQIYGGDNAPYIWVKTPNELSSWKFFDRLLCECHIVGTPGVGFGPSGEGYFRLTAFGRYEDTIESISRIQNWKLMRFTKMQGAGNDYIYLNGFEKLPADLSALSRRMSDRHFGIGADGIVVIMPSDHCDFRMRMFNADGTEAEMCGNASRCIGKYVYDKGLTSKTQLTLETLAGIKHLILDVKNGTVNRVSVDMGNPILSAPKIPVNTSLSEIISYPLEIENNTFNITCVSMGNPHTVIFLNEMERYDLHHIGALIEHHELFPKRTNVEFVEILSPDHLKMRVWERGTGETLACGTGACASLVAAVLNGKANRKAVLHLLGGNLDIEWNEKNDRVYMTGEAVTVFEGEWNNNIMLLFCNNIQIVVYIIEIYLYNIYIYILLSYLSKRLFLSQNNYNMQTKRKASLILDDGTVFEGKSFGYEKPVAGEVVFNTAMMGYPESLTDPSYSGQILVTTYPLIGNYGVPRREEENGLSRFYESEKIHVEALVVSDYSFEYSHWNADKSLADWLKEEKIVGIYDIDTRELTKLLREHGSMKGKIVFEDGEDIDFVDPNLTNLVAKVSCKEVIRYGNGNKKVVLVDCGVKHNIIRCLLKRDVTVIRVPWDYDFNTIEYDGLFISNGPGDPDMCDVTVEHIRKAMNGTKPIFGICMGNQLLSKAGGARTYKLKYGHRSHNQPVRQVGTNRCFITSQNHGFAVDNSTLGSDWEPLFINMNDGTNEGIRHKSKPYFSAQFHPEAASGPTDTEFLFDEFVNMLMNQTEIKKIKKVLLLGSGALKIGEAGEFDYSGSQALKALKEEGITTILINPNIATVQTSEGVADKIYFLPVTPYFVERVIQKEKPEGILLAFGGQTALNCGVQLYQSGILEKYNVQVLGTPVQAIMDTEDRELFVKKLDEIDVKTIKSEAVNSIEDAAKAASELGYPIIIRAAYALGGLGSGFCDNEEELRVKAEKALSFSPQILVEKSLKGWKEIEYEVVRDRYDNCITVCNMENFDPLGIHTGESIVVAPSQTLTNSEYHKLRELAIRIIRHIGIVGECNVQYAFDPKSEDYRVIEVNARLSRSSALASKATGYPLAFVAAKLGLGYGLFDLKNSVTKETSAFFEPALDYIVCKIPRWDLGKFQGVDRELGSSMKSVGEVMAIGRTFEEAIQKGLRMIGQGMHGFVENKDLVIPDIDKALHEPTDKRIFVISKAMRAGYTVDQIHELTKIDRWFLQKLMNIVRTAQELETLDESIAQFKSDKKAGAELIRRAKIQGFSDFQIARAIWKDKMEDCHMQWVRKYRKSLGIVPVVKQIDTLAAEYPAQTNYLYLTYSGIANDVKYLGDKKSIVVLGSGAYRIGSSVEFDWCGVQALNTIRKEGYRSVMINYNPETVSTDYDMCDRLYFDELTFERVMDILELENPHGVILSTGGQIPNNLATRLDEQHVNILGTTAKSIDNAEDRHKFSSMLDSLGIDQPRWRELTSLSDIYDFVKEVGYPVLVRPSYVLSGAAMNVCSNNTELEQFLQLAANVSKKHPVVVSEFIQNAKEIEMDAVARNGEVLIYAISEHIEFAGVHSGDATIQFPPQKLYVETMRRIKKVAGQIAQALNISGPFNIQFLAKNNDIKVIECNLRASRSFPFVSKVLKINFIELATKVMMGLPVEKPNKNEFDLDYVGIKASQFSFSRLQKADPVLGVDMASTGEVGCIGLDTSEAVLKAMLSVGYQIPQKNILLSTGTTKQKADMLEAAQLLYQKGYNLFATGGTHQFLTDNGIPAVKVYWPSESDREPQALEMLHNKQIDLVVNIPKNLTQKELDNGYKIRRAAIDFNIPLITNARLASAFIQAFCSLSIDDIQIKSWDEYKMENKAIPLRVKVISVSLVWLTLLYCSFFMSGNIWLASLFIVLAIGITWHILSYKTLSKMAKEIKFNIQAREELKKGVDELADAVKVTLGPKGRNVIIEKKFGAPHITKDGVTVAKEIELEDPFQNMGAQLVKEVASKTGDDAGDGTTTATVLAQAIVNVGLKNVAAGANPMDLKRGIDKAVAKVVEGIKAQAQEVGDDFEKIESVARISANNDSEIGQLIAEAMKKVKKEGVITVEEAKGTDTTVDIVEGMQFDRGYISPYFVTNTEKMECEMDTPYILIYDKKISALKDMLPVLEATAQTGRPLLIIAEDVDSEALATLVVNRLRGSLKICAVKAPGFGDRRKEMLEDIAVLTGGVVISEEKGLKLESTTIEMLGRAEKITVNKENTTIVNGMGSKDSIAARVAQIKAQIETTTSDYDREKLQERLAKLAGGVAVLYIGAASEVEMKEKKDRVDDALSATRAAIAEGIVPGGGVAYIRCIPALDGLKGANEDETTGIEIVKRAIEEPLRQITANAGVEGAVVVQKVKDGEGDFGYNARTDTYENFFAAGVIDPAKVTRVALENAASIAGMFLTTECVIADKKEENPAPAMPAPGMGGMGGMMMKIKPLADRVLVLPAPAEEKTIGGIIIPDSAKEKPLKGKVIAIGNGTKDEEMVVKPDDTVLYGKYAGTEIELDGEKYLIMKQSDILAILMKKDRLITLAIHTYPKALILKGVLESQGIAVVIQNVNLLKPVISPGVRVRIHEKDLPHALEILETDPVFGKSEVSDKPQKNRILIPIDFSDYSLQACRLGFDFAATHQAEVVLLHTFLSPFSTGSLSLTETISYELKESEEHKLLFAKANREMANFCEKLQRLMTDGDFPSAPFIYRVCEGVPEDTIILMAKELNPSLIVMGSRGKTRKEIDLIGSVTAEVVDSGNFPVFAVPEGFTHTCMNEIKNIAFFTNFDQQDLISLDTFMRLFENYSFGIMFLHLTEKSDAWTEIKLAGIRDYCQSHYPGREIDYKIIGEENFLDNVEKLFHESAIDVMVVPNRKRNIFARLFNPSIAHKMLFHTDTPLIAIPSMTKTITFNELRRIKDSLPDGSMHRIADELNVTTQTVRNYFGGSNYSFGKNCGLHIEPGPDGGIVVLDNTQIYDMAIRILEEENKKMSILQQLIEWDKELLLFLNSMHTPFGDKFMWVYTGKYTWIPLILSLLFVLFRKNWKEALLVCVALAITITCCDQFASTLCKPYFARLRPARDPELSEFVQIVNGYRGGRYGFISSHAANSFGAVVLLSMIFRNKFFAVTSLIWAIVNCYSRIYLGVHYPGDILAGIISGTIIAVIICIVLNGFRSFLLNKKFLNNRESPYIKDPDIRITTGVIYLSVLCIAVYALIATYSMKKIYIYLLFVVIGISPIYSQTTLTQANEAYGQEDYIKAIELYEQTLREQGVSSDLYYNLGNAYYKHNEFAKAILNYERALLLNPGNEDARFNLEMANTHIVDKIDPVGKFFLSVWIDSLRNFLSSNTWAVIGIVSFLLFIGGLYLYLFSKSVKAKKFGFFGGIILFLIAVLANWFAWGLNSKLKARSEAIVFAATVPVKSSPAESGTDLFILHEGTKVSILSKLGDWSEVKISDGNRGWLPSSSIEIIMRKYLIMFGALVCMATLWADNVRFAVDGPRQVIQGQQFQLEYTLYNASGKDLRLPEFSGCKVLYQGTSSGTSVSVVNGNVDRQTTETHVITLRAEKEGSYTFAPATISADGRTFSTNTWKLTILPPDKTSSSAGGASRQSMGEEAGNTELFIRTVLSKTKVYEQEALLATIKLYTRASGVQAENYSFPSFEGFVVQDIDLPQNTSFELENYNGVNYKMAILKQCLLFPQRTGKITINPGKFEFQVETYQLVNGPFGPMRVPQGVSRSVSSNAASVEVMPLPAGKPVSFMGGVGNFTLSSSISSTHVKANEAITLKLIFKGSGNLKYMKNPDLKLPNDFDTYDPKVDVSVKATTGGVSGTRTVEYTTIPRFAGKFKIPAVEFSYFDTKSKQYKTLHTEEYEITVEKGASGEGGKTVSNFSNKEDLKLLNRDIHYIKLNKMNLVQTPSIYVDNWKYWFWYILPTLAFCIFVLINRKQAKANANVALMKNKKANKVALKRLKVAGKYLKNHDKEHFYDEVLKAIWGYLSDKLSLPLSELTKDNVATELEKYGAGEDLISTFNDILSRCEFAQYAPAQSNETMEELYSQTLDAISRMENTVKKMKSIRYIMYFVLMSMTMSLLAQENAQAVAQGENKIDEKVERNTIRKGNGLFNDKKYTEAEIEYRKALEANPSSEIATYNLGAALYKQQKWNDSRNEYRKIVQASSDSLRAAHAWHNLGNISFQEKNYAQSIEEYKNALRRNPKDDETRYNLRLAQLLLKKQQQEQQNQDKNDDKDQQDKNKDQQKDQKQDQQEQNNNQNNQDKNKDQQEQNKPQQQQPQQSQMSKENAQQILDAIQQDERDTQEKVQKALMQQQKRKKTDKEWMFRFAQPEYLYLLIIVPILWGLFIYGRYRSRRNLAKYGNPSVLAPLMTDVSKYKPWIKFIIQQLAFIVIVFMLARPQFGSKLETVKKQGVEIMIALDVSNSMMAKDIAPNRLEKAKMMLSKLVDELDNDKIGLIVFAGDAYTQLPITSDFVSAKMFLNTINPNMVPTQGTAIGRAISTAMNSFTPNEGVDKAIIVITDAENHEDDAVQMAKAAAGKNIKVDVIGIGSLEGVPIPTGNSENNFIKDRDGNVVISKLNESLGQEIAKAGTGIYVRADNTNSALRALTSEVKKMKKADIESKVYSQYDEQFQGLAWIALLLLIVDVFIVDRKNSWLKKITFFSMVFANPLYLLLLLLIIPVIAWYILKQKRMQAALQVSTTQPFDKMPRTYKIYLRHFNFVLRVLAVVLLIIALARPQSTDSWQNSSTEGVDIVLALDISGSMLARDFKPDRVEAAKDVAAQFVSGREHDNIGLVIFAGESFTMCPMTTDHAVLLNLMKDVHCGMVDDGTAIGDGLATAINRIKDGPAKSKTIILLTDGTNNAGDIAPATAAQIAKSFGIHVYTIGVGTKGLAPTPVQTPYGITYQNMPVEMDEEALKQIAETADGKYFRATNKNVLKGIFEEIDKLEKTKLTVKEFSVKEEEYTIWALMALLCLGLEIVLRHTLLKNIPMKRRYIILQLLGLCSVLPVFMATVSAQNNIVVRAQMDSAAIMMGDQTTVRLEVSQDKDKFVKLPIIQDTLVTGVEVLKVSKPDTIDLKNNRIQINNEVLVTSFDSGLYYLPPFKYVIEDDTFETQALSLKVVPVPVDTTHAEFDIKGVDAPPFVLMDYIPSWVIYLLVALIVIAAGIYAYWRWGRRKKGEEIIDEKMLVPPYDRAIQALHELKDSKLWQQGQEKAYYTTLTEILREYIDERFHINAMEMTSSQIIETLHRNEETKAVNRQLRDILEMADFVKFAKMRPLPDDNEQVMRYAETFVEETKPEEKAPESENQASEKTEMETSELLKKVRHIEIKTRGLSRNIFAGQYHSAFKGRGMAFSEVREYQYGDDVRDIDWNVTARYNKPYVKVFEEERELTVMLLVDVSASRNFGAVGEAKREMMAEVAATIAFSAIQNNDKIGMIFFSDKIEKFIPPKKGRKHILYIIRELIDFQPESTGTNISLALEYMTNAIKKRCTTFLISDFVDGNDYKNALSIANRRHDLVAIQVYDRRETQLPDVGLIKLQDSERGCEQWVDSSSANVRNRYAAWWNSRQERMLATLRKSRVDLATIATNDDFVVALMTLFKRRGMSETVDIRELNDLIASKSSFVNMITQGMDQVIVGQKHLVDSLMIGLLSNGHILLEGVPGLAKTLAIKTLASLIDAKYSRIQFTPDLLPADVMGTMIYSQAKEQFQIKKGPIFANFVLADEINRAPAKVQSALLEAMQERQVTIGEQTFKLDDPFLVMATQNPIEQEGTYPLPEAQVDRFMLKVIIGYPKKEEEKLIIRQNISGRKIDIKPVLQPSEIIEAREIVQKVYIDEKIERYIVDIVFATRFPQDYGLGELKEMISFGASPRASISLALAARAYAFLKQRGYVIPEDVRAVCHDVLRHRIGLSYEAEANNMTAEEIISEILNKVEVPMNEKISFPDLVGLLSSKMNITKKEAETFLKEFFTVSTEVITSGEELRINGLGLFKPIWVEARGSINVQTGEPVEIPGHYKLSFIPDKVLREAVNAPFSSFSVEVLNDHVPIEDMTAVPSQDIDENNDICNTENVELQDSKEIREKEEEDEPIEPAHEYIQEDKSADEESSESTVSSQEIEKFQEEIIQPESETKVEEKEEDCYEDYLRKSASRKSFWWGVLSAFGIIIICLAGGIFFMGNDSPYVVKIGEYTLSLGKQSIDSRPMNNNPESVVLPENKDTLSEMEKDSVLKDSVISVSPLAAPEVKPVIETIRSGVFLTTLARKYFGHKAFWVYIYEENKDVIKNPNQVPIGTRLTIPSASKYDIDANNRTSVENAKALAAKIQSRYEMDHKSFLIQLQSRLGKDKGEIDSYMSAFLQILKERCSQMDTVAIQGFGLFEPKKKLERVVVNPSTGKRMLVPPKMILSFKPGSAIKTKLKMLSSKMENVRKYFKRDISWLSFNYRVLMEAMDHTVPLFDRIKFLSIYQSNQEEFYRVRVSEYHQILSDPLQSIEDKRQAENTLSAINQEVNRQVDIFNKFFFNEIIPELEKEGMVLYHNEQIENCHQEEIRNFFKEEVFPFLQPVLILKNDIVSFLRDNRLYLAIKMYKKGDPDRQPFYAQIKIPFSKVPRFINLTPHDGKNYLMFIDDMIALNLDVVFPGFIIDSHYAIRVSRDADFSIEAKEVANIVDAVRKRVKKRKIGNANRLVYDGCMPLDMLQYICDAYDIPHGQCIRSGRYLNLEDLSKLPNLTGKELSEVLPSPMQILAFDSAPTMFEVIRQRDFLIHFPYQSFSYLTRFLTEAADNPNVTDIKLTQYRVAENSEIIDRLLYAAQKGKQVTVYVEIKARFDEENNIITSELMRKSGIRVVYSTPGLKVHAKALLIKCSTLHKNQPQAYAFLSTGNFNENTARIYSDMGLFTVNREITSELDKLFSILDGSSNDRYFQTLLVAQFNMVDVLKQKINFEIEEARQGRKAHIILKMNGLHDTNMINALYDASEAGVHIDLIVRGINCLVPNQPYSRNIRMIRIIDSYLEHARIWYFYAGGHEDIYLSSADWMRRNLNRRIETAVPIFDQSIKNEILSIISLQLQDNVKACYIDENLENHYVQSRETKLRSQRHCFQLLEKYSIPDTQSVIPEIFISMRLNHVALWADDIESVRLFYMKYFGALCNDRYVNESKKFTSYFLSFDEGTACIELMNRPDILDMPFNRGQVKGLAHLSISVGSREAVDELTRRLQTDGYTVIGQPRLTGDGFYESTILDPEGNNVEITEMIFILFFIIIFAEKSQIMKKIVFLFLICMPICQVVSAQTLKKQNQMLKDSIGIMHKVIDEKSSVNSALSKDNSTLKNQNVLLKASKDSLIKEQKTLLGKYKNLSEENDLLKDSLFIYRGQNKTLNLQVDSLNTKIENLTEEMNTKLDYMAKQEKIWGRKKYFNISYGMPSLTRGNGLEKLNSDFAVAINRGNTYYLHKKPLFGMLKFGLDWTVFDIAAAKYTVEESDFEDGGDIYKAEIGMQFGPSITINPVDFLKINVYFRYDPTFSVAYNQDSDFLMNYGSYFNTGLAASYKVISLGAEYRWGTTSYKIDEENQDWKVSGAYLYVSFRFMMNRFICIPLSLFLLSVCNPKKNERPNGWYYITDRVEDSISLEPIVTINDFEEIKLDSAENLKGKFIYQITGHVAADCVEKWADATEHSIGKRIGFVFQDEVICTPCINCRIETGSFAISAQDTDIKSIYWQIVRKIHSRMSIKLAIKCQFIFKHSLSLNCFANNLKYEVKLFREIMKKLLSLWITVVIILFQVHVSEACTGITLTTKDNSMILARTIEWGGSDLNSQYVVVPRGYEQYSYIPGGERSGMKFTARYGYIGLSVEQKEFVAEGLNEAGLSAGLFYFPGYGRYEDYDSKLKDSSIADLQLVSWILGNFSTVDEAMKAIKKIHIVPIDPRASTVHWRMADITGKQIVLEIVDGQPNFYENTLGILTNSPGFEWHMTNLNNYINLYSGTTNPRTLGNIKLSSFGAGSGFLGIPGDVTPPSRFIRAAFYQTSSPQKETAIEAVIQSFHILNNFDISIGIEFSESETPTDIPSATQWTSSTDLTHRVIYYRTMYNSDIRCIDLKAIDFNRVKYQAVPLDLIKQQPIQPVQINMDRKKEKFKILKFGGTSLGTVERIKHVANLICNNELNLVVLSAMSGTTNSLAEIASLLFNGDIDGAQRDIECLKSKYIEVADKLYLSAKSIEEAKKFILCSFSSLQTIAQSPISSKQEKIILSQGELLITRLMHIYLKEIGIVSVLLPAIEFMRTDRNGEPDIHFIKRNVCKLLKRYPNNRLFITQGYICRNVSGEIDNLQRGGSDYTASLLGSALNACEIQIWTDIDGLHNNDPRVVSTTAPVRTLTFDEASKLAYFGAKILHPTCILPAKLKNIPVRLLNTMNPQAPGTLISDTADTGKIKAVAAKDNVTYIKLRSHYKIPCYRFLEKIFHCFAQSHTPIDLVVTSNVEISLSIDNKIHLPKIISMLERYADVSVEDDMVIICVVGDLKWYNVGFEHQIVEALKDIPVRMISYGDNCDVSFVMRRDDKKRALEALSQRVFSMATDKTKAEKEYTVEEKLKTLYDLQTILSEIDRIKTLRGELPLEVQDLEDEIAGLETRIKNFHTEIEDLKAAVSAKKVEIQNAQTLIEKYTKQQDNVRNNREFDFLSKEIEYQTLEIQLCEKRINEFIAAQEAKSNEVAASEEILQDRQHILNEKKSELDEIVSETKQDEEKLREKAKKLENKVEPRLLSAFKRIRKNARNGLAVVYIQRDSCGGCFNRIPPQRQLDIKMRKKIIVCEYCGRIMIDPELAGVKDVNMIIVNDIIKAIESVAPLNWQESYDNAGLQVGGRFQSVSGAVVCLDVTEAVVDEAISMGYNLIVSHHPLLFKGLKSITGNSYVERIVIKAIQHNIAIYAAHTNLDNAPEGVSYRMARKLGLTSIRVLDPLCGRLIKLVTYVPSTHVESVRNALFEAGAGHIGNYDKCSFGQEGTGTFRAGTYANPYCGTIGEFHREQETRLEVIVPIHVQEAVIDALKRSHPYEEPAFDLIPLSNRWEQVGSGVVGALPEPVDEVLVLEKLKEIFKAGCVKHSPLHNRKISRIALCGGAGASLMTKAVIAGADMFVTGEIRYHDYFEFESHILLAEIGHYESEQYTKEIFCEIIQKKFPTFAIHSTQVDTNPINYLMYRTNTCGELRLNHVGQKVTLAGWVQRSRKMGGMTFVDLRDRYGITQLVFNQETDADLCDKANKLGREYVIQVTGTVTERSSKNTNLPTGEIEIIAENLVVLHTAETPPFTIEDESDGGDDIRMQYRYLDLRRSVVRRNLELRHKMAFEVRRYLDELNFLEVETPVLIKSTPEGARDFVVPSRMNPGEFYALPQSPQTLKQLLMVSGFDRYFQIVKCFRDEDLRADRQPEFTQIDCEMSFVEQEDVLNIFEGMIKHLFKKIRGIEFNEPFLRMTWADAMKYYGSDKPDMRFGMKFVEMKDLTEGHNFVVFDSAEYVGGICAEGCATYTRKQLDELTEFVKRPQIGAKGLVYVRFDENGTPKSSVDKFYSADDLKKWGERFGAKPGDLLLILAGPAMKTRKALCELRLEMGSRLGLRDKDTFAPLWVIDFPLFEWDEETQRFYAMHHPFTSPKAEDIPLLDSDTGAVRANAYDMVINGVELGGGSIRIHDSELQDHMFRLLGFTEEQALDQFGFLINAFKYGAPPHGGLAFGLDRLVSMFAGLDSIRDCIAFPKNNSGRDVMLNAPSILAESQLEELCIKVNPKNMHGICTVLKQNAPKHNKNIRNVYRLKVYFLMKYIKKKHMTKIKLFQLRLFRTIRRQICSIDMIDIETFTNIFRLLNHVDRSIIEKYIQGYSIKSIADESEYSKAFVSERIYVFQNELKKEISKKQSKVKNMTVDNTTVEGTECTIRFYFLGRKSVRKGFNTLFMNLIRKKMKKFTVCGAAVALCCLAGNVQAQEPEYPASASTEVFDFTPWNDDKLLLLFAQAADEGRKYPTKEEFEAAGFNLDLEFSRSHVRPAVIMEDAAKNIVADVYPTRRLWMNTPTGQGESVGGYPSSEFHSDVFSMWNYTNLYGAWNHTILQAPGSWADAAHKNGTHMFSGIKFFESWGTTSSEYIKLITKKNEKGEYVYVDAFLNALLFLGLDGINYNFEDSGYQQTDVVGFHQALYKRAKEIGFDSFHIGLYTSSSSLSTRTANALYGTKANGKTADLMLNYSGGDFATQYMASSVQAAETAYGTADGLYAGGWYRHMDLSWPLLNQDEATKRCGLCLWGEHKISRFFQYVVGKDPMDMQTNYQKLLEKGFSGGYRTPIQRPAPSYTNVFQVENASEADTQLAEFCGLAEFIPERTAIQGDLPFNTYFSLGNGDFYAYKGKKTLGSWYNMGQQDYVPTYRWLIYQTGTTNRSTDIDAEFTHEDAYIGGSALRLKGTPTSTGSDVVLYRAKLTVSGNNATAKLAVKSGIEGSNASNLYLILKKFDDSAWLEFPVGDLKGATWEEKEIALSGINQNDVIEYIGLRVKGSASDSYKMLVGQLQLCDDRSAMKPADIDDLSVVTEVKEETTSSMSVKLTWSVDYTGFSPVRKDYGMVYNDEVNIDHFEILYKNGEDGRVSEVGRTSTWSAYVGNIQFEDENDDPYIGVRSVSVDLKSYSPVVWTHVPRATGSLPEPDTDLYGKTYLNLESEGVETAQKYRYVSSLVTTGATENLNYTSNTPVGGDNYLRVTDQKLKVEQGQKVTVKFAGRVNGSDDGLKWCLGKAYVDWNLDYVFDASTDELVMEVGTLNAGTDSIATGCTFILNVPEDAAVGTSRFRMVFSDAWFTHPGPTGGTAKGFSIDFDVEVTGSNPGREPEKTYADYRDQGIADEPDGLDVSGIEDVVNGNGNGVSSVSSLYPTVATDVIYFNNVDKAWIYTVDGQLVKYVNNNPESVNVSDLSSAMYVVKMQKGNVVRSQKMFKKMKKTVLAAFGALLSVVSLHSCLDFDMPTDTFTGGDTELDPIVYKGKADSIDYRKEISEEGFAFAEKELNNYFFQLQTVQYCMRGGKEGQLPGAHQYQYVYNITVDNYAGYLCVPHNFSHGGDGILSSTYYYNRGYCDGPYGAFLMVKNNLVNMLNHPHIDSIPEMKAIGLLLYNYSAQEMVDLYGSIPYVDHKNNKETNPFTFNKMADIYETIVDNLDTINACLKHYEQRPGWYKSRLNGILQQSDWVTKDFSIDTWRRFANSLKLRMAMHIVKVDRTKAQKWAQEAVTEGVIETENQEIALDPVVSGFTHPLVDISKLWGDSRLNASFESLLFSLKHPYVQDDYALFEKNSSQIVNETNPEEIEPTNSRIVGLRAGISMVSGQTVSVNPRIAYSAVSSNRISMAPLYLMKLSEVQFLRAEGAVRNWAMGGSAQSFYEAGIRSAQLDQRTNSQYGEKVDEYMSVEEPVAYAYTDPMDHTNDIASVTKIGVKWNEGDTPETKLEKIITQKYIAGFPYSYEAWNDLRRTGYPKIFPVLNVEDGDGSLVQGDLIRKIPLPGRDTSAGLSDIQTSGIEALGGTDTQGTRVWWDVEGSNFMYRRNLKAIIVAFVLVSGFGIGTAAHVSAADTMSPQGAAQSKSVNQNVATGTKVVTGTVTDPSGETLIGLTVKVSGTNVAVATDLDGNYSIKVPAGSNELEFSYIGYQTIKRAINGQSKIDVVMQDNSEVLDEVVVTAMGITRKESSLTYATQEIKGDDLMKVQDANFVNSLQGKAAGVTITQSAGGAGGTSKILLRGNKSVMGNNSPLIVIDGIPMTNQVGGAASSWAGGESLTYSSSSEGGDALSLINPDDIESINILKGANAAALYGSAAANGVLMITTKKGKEGRVSVSVNSNVTFENPLVLPQIQNVYGANVNLAASTLTTESWGKKISEMTPEELNYSGAKLRNYAKDDISDFFETGATYNNSVSVSGGTEKVRSYFSYANSYADGMVPNNTYQRNTFSFRQSYSLFNKKLNVDLSLNYVHAQTKNRPGGGTVMNPLYDLYRMPRNIDMDYYKKNYRGEGTWTSNIYGYYNDQKQWVPDGTIELSGPMQQWAYFSPGNNNPYWITNANKGQTEEERAYGYITASYEIIPGLKIQGRLNMDRAKYKGFTKRMATTQNVAAIEDYGMYGQDLIWSNDVYVDAMLSYNKEIKDFSVSASAGWVGHTVKGETQKLWTRATYFSYTDMNQLPTRINFFEPLASWGGSNMNEYSLSSNWDKGLFFTGQVGYKDYVYLEGSYRQDWYRAFKQFEYRGTPDNYGYFSVGANTLMHRYISLPEFITHLKLRASYSEVGNSIPNEVFNKGKADLATGAIASSTYGYFDNPIPETSKSFEAGFDVSFFDSSLNWDLTYYHTGLYNNYFLQATTGGKSKPVNTGLIRNQGIETTVSYSLGFAKDWMWRTSVNFSYNDNKIVKTFKDEQGKSSKLEQKIAGGNIVVRYDEGGSYGDMYALDFRRNDDGSIYLSSNGAPQLSNNSYVYLGNMNSKFQLGWGNTISWKDLSLYFLVSGRIGGKVISLTEAYLDYQGVSKRVGDARLAAEANPDLQWNGKPAMVMPDGNLAPIEEYYKAVGGNMFGSQYVYDATNFRLAELSLGYSFHNLFGGVISNLSLSVVGRNLFFIYKDAPVDPDIALSTKNGLGAFDIFNMPATRSVGVNLKIDFMIKISFENIRQAAKNIGNYALRLSEKIRRISPRVWLYVGAGILLLSGGLYWLLRPAPPGPDLPIVEVEPVVTDDVEIYGEYVGRIRAQQFVEIRARVEGFLEKMLFDEGTYVKKGQPLFIIDPKQYQARANKAKAQLNKNKALALKAERDLERIRPLYQQNAASQLDLDNAIASYESAKAEVEMSEADLTQAETALGYTTVSSPISGYISERNVDIGTLVGPGGQSLLATVVKSDTVRVDFSMTGLDYLKSKARNVNLGQKDTTRTWEPYITITLPDNSPYPQRGIVDFADPQVDPQTGTFSVRAEMPNPEHILLPGQFTKVRLLLDVREAAVVVPNKAIAIEKGGAYIFVVRADSIAERRMVELGPEVGNNVIIERGLVPHENIVVEGFHKLTHGDKVIPSTYRAEQEDHSKNMKSDFFIDRPIFSIVISIVIVIVGVLGLFLLPIDQYPQIVPPVVKVSASYPGASAQTVTQAVATPIEQELNGTPGMLYMESTNSNSGSFSATITFDISTDPDLAAVEIQNRVKQAEARLPAEVVQNGISVEKQASSRLMTVTLRSNDPKFDEIYLSNYATLNVLDMLRRVKGVGSVSNVGSRYYAMQIWVQPDRLANLGLTVDDLQKALKDQNRESAAGVLGQQPISDIDITTPIIAQGRLSSVGEFEDIVIRANPDGSLIRLRDVARISLEAQSYNTESGINGGNAAVLNINMLPGANAMEVAESVKKEMEEISRNFPEGITYEIPFDMTSYISQSINEVYHTLFEALILVILVVFLSLQNWRATLIPVIAVPISLIGTFGIMLAFGFSLNMMTLLGLILAIGIVVDDAIVVVENVERIMNEEHLSPYEATKKAMQGLGSAIIATSLVLCAVFVPVSFLAGITGQLYRQFTITIAVSVLISTLVALTLSPAMCALLLKPDSGKKKNKLFRYINLWLARGNRLYEKLIRKGLKHARRVVAAFGISLIAIWVLNEIVPQSFMPQEDQGYFTVELELPEGATLERTRHVTERAMNYLMSREDVEYILNVTGSSPRVGTNQSRSQLTVILKPWEDRKSSNLRDIMEEIREELKKYPESKVYLSTPPVIPGLGSSGGFEMVLEARSDASYADLQRAADTLLYYASQRKEISGLSSSIQNDIPQLYFDVDRDKAQMLGVKIADIFSTLKTFTGSIYVNDFNMFNRIYRVYIQAEAPYRAHKDNLGLFFVKGSNNAMIPITALGTTSYTTGPGTIRRFNMFTSTTISGEAAPGYSSGQAMAILEEIASKHLPKNIGVEWSGLSYQEKHVSGQTAYILALALLFVFLFLAAQYESWSIPIAVILSLPIAGVGAYLGNWICGLENNIYFQIGLVMLVGLVAKNAILIVEFAKDEVEKGNNAVDAVIKAAHLRFRPIVMTSLAFILGMLPLVFASGPGSASRQGIGTGVFFGMIVAITVGIIFVPLLFVWVYKLKSKMMKRMKQMKVFIYILVTAFILSSCSIQKRCQAPELNLPDEIIAGENDTLTIADMSWWELYSDSTLSKLIKKTLRNNRNMQAAEAHIRQMEELYRVSKASSWPTIGAQLFADHETNDYYGEKFTKDPEFSLKASLGWEIDLWGSLRWGKRKGAAEYLASVEAARAMQMTLIAETATAYFELVALDQELEIVLQTVKTREESVNQARLRFEGGLTSETAYQQAQVELASASALIPELEQKIALKENQIAVLAGEYPSKVERGEFDLNVSLPENIPIGLPSTLLQRRPDVRQAEQQLQAAMAAVGIAYADRFPRLTISLVGGLENDELKGFFESPFSYVSGNLVAPLLTFGKKKAQYKASLAAYDEKRFAYEQKVLEVFREVNDAVITYQKKRRTSELQLNLFEAAQKYVDLAQLQYFNGVIRYIDVLDAHRNFFDAQIGLSNAVRDEYLAMVNLYKVLGGGWGTNPIMDIEFVRSRFIKHFDGSTGSVYASPGRINLIGEHTDYNGGFVFPGAIDKGMVAELKINGTDKVRAYSIDLKDYVEFGLNEEDAPRASWARYIFGVCREIIKRGGKIAGFNTAFAGDVPLGAGMSSSAALESTYAFALNDMFNCGIDKFELAKIGQATEHNYCGVNCGIMDQFASVFGKAGHLIRLDCRSLEYQYFPFKPEGYRLVLLDSVVKHELASSAYNDRRKSCENVVAAIQKKHPHVEFLRDANMSMLDEVKEEVSAEDYMRAEYVIGEVQRVLDVCDALEQGDYETVGQKMYETHHGMSKLYEVSCEELDFLNDIAKECGVTGSRVMGGGFGGCTINLVKDELYDAFVEKAKAEYKTKFGRLPKVYDVVIADGARKLCMDMTLSGLNPTHFQGLVDGKQTGLYILVNKNGCELTLTNYGARIVSLMVPDKNGKMIDVVTGHNNIQEYLTSEEPYFGATCGRYANRIAKGKFTVDRVLYDKLAINNGPNSLHGGVKGFNFHVWDANQLDKQTIEFSRLSPDGEEGFPGNLQVKVIFKLTDDNAVDITYYAETDKPTIVNLTNHSYFNLSGAGDPYIGDHLLCIDADYYLPTDDTAIPYGEKSAVEGTPMDFRKLYEVGSRINEPFEQLVYGKGYDHTYILNKKRSGEFSFCAECVSPKTGIVMDVFTTEPGVQLYTANWMTGNFIGKNGKRYPMRAAICLETQHFPDSPNHENYPSVILRPHEKFESHTQFKFSVREKMKVNEIFYSLQGEGVFTGTAAIFVRLAGCNLHCDFCDTKHEDYTIFTEEEIVKAISDYPAKHVVITGGEPTLQLTHSLVDRLHEVGKFVQIETNGSIALDTDLERSIDWITCSPKTIPVKIQRMNEIKVVYQGQDMELYEKIATAYECFCSLQPCDVNDEIKNENNLTAAIEYIKSHPRWRLSLQTHKIINIRMYYVAKTMEIAGAHSLHLSYESKCEKLHGHNWIITVYCKAKELNQDGMVCDFKHIKDKIHGYLDHGNLNELLPFNPTAENIAKWITDQIPECYKTKVQESGGNTAIYEIDDFENENIDRMKDSLIVVSGGMDSITLLYECADRIALAVSFDYGANHNHKEIPFARIHCERLKIKHIVIPLAFMKEYFRSSLLDGSDSVPEGHYADENMKSTVVPFRNGIMLSVACGIAESNGLKQVLIANHGGDHAIYPDCRSEFIQAMDKAMRSGTYENIGIFAPYTDISKTEIANRGKKLNLNYAETWSCYKGGEKHCGKCGTCVERKEALREAGIEDQTEYEDMKAKTRVRIIFFCLTISAIGLPLILISTPSIHQHFEPENIAISFVENLSNANFQEAKKLSTPESAETLYLFETLVGNQSDELKNTPTHFNISYSEMNTSQDTLFVQGKLFFSHKHKLIRKINLTLVNRRGNWLVDCRDNTIFMNKFQDIIAGDTPVLVDFFAEWCGPCKMMKPVLEELKKKMGNKIIILKIDIDKNISLSSEYRIQSVPTLVLWKQGEIIWRQSGALSLNELEQILSSYIRMFLFQPYISPQKITGRKEKRTYSFYLSLALHYLCKNAKIGGTRHNQINLFLPSFALSLQRIKKKLMRSNLYLKLFISFFKIGAFTFGGGWAMIPLIEREVVDKQNWIKREDFVDALAIAQSLPGVLAVNISILIGNKLRGLKGCLMATLGTILPSFLIILAIAIWFVQTYDNPVVERIFKGIRPAVVALIVSPVFSTAKTARINIKTVIIPIIVALSIWLGGISPIWFVLLGAIGGILYCNHVIASSKQKSNKEEKMWIVYLNLFWAYLKIGLFGFGGGYAMLSLIQHEAVEVVHYGESQPWLTPTEFTDIVAISQMTPGPIGINSATYVGYVAAGNSIWGSIIATFAVCLPSFILVLLVSRFILKHKDNITIKSIFSGLRPVVVGLIASAALLLMNKENFPDYTISIGIAIISFVLVHYAKIHPILVIVLAGISGYALYMNYEETLEYLYKQLPVFQQIGSAAYKPGLQNTEALDKYFGYPHRKFHTIHVAGTNGKGSVSHLLAAILQLNGYKTGLYTSPHLIDFRERIRINGKMISKEDVIQFAEKHLASTLHIQPSFFELTMMMAFNYFAENQVDVAVIEVGLGGRLDSTNIITPDLCVITNISYDHVQMLGDTLPKIAREKAGIIKSGIPVVIGEAQGEVKQVFIDRAKEIKAPIIFAEEQIHFRSTQRNDKGWEFDSPEFPHLFGELSGLCQEKNAATVLTAVGQLRNLGYNISDQSVYDAFAHVTSLTGLMGRWQQLESSPRLICDTGHNTGGIQYIVRQLQNESYQNLRIIIGMVNDKDISGVLAMLPQNAVYYFTRASIPRALHEERLYELAIKAGLTGKCYPSVQQAVEAAKKESRPDDLIFVGGSTFIVADLLKTMLSQQMKKVISTTSAPAAIGPYSQAVETGNMIFLSGQLPIDPKTGIMPEGIKAQTRQSFANIKAILAEAGYSVEHIVKTTVLLADMSLFGEMNEIYAEQFGSVFPSRSAFAVKELPKQALVEIEVIAVKAMVQRKNKPSFFARASLLIKRLWQFVSVDIWHVTEYKLHIHILKTLNLSVRCFLNEKLQEKASALTFSTILAIVPALAMLFAICKGFGFQHIIQSQLFDYFPAQRNALEYMLGFVDQYLDQMKGGVFVGIGLCFLLWTLISLLSNIEKAFNDIWQVQGGRSFYRKVTDYTSMFLILPILMVASSGFSLFMSTMLSSSVLFDFMSPLLRWVFRLAPYILTALFFTAIYIFIPNTKVKFKYAFISGLICGTVFQIFQFIYISGQIWVSKYNAIYGSFAFLPLLLIWMQFSWLICLFGAVLTYSSQNVVNFNFEKETNDISRRYSDYIILVIATVIVHRFKEGLPPMTKGQISRRYAIPIQLVERTVDELERVNIISQTLSEEERVPAYQPAVDISRLTLGYLLRAIDREGDEDFICNLKADFPKEWAAIIDTRRLMEEKGDSIALKDLKIEESRVLSHKLNNNEMNSYGKKLMGIALIAALSSGITIGAFSILNKSADSKIQDQSLDSGYAQPTRFTRVINRPAVETDFTTAAENTVNAVVSIKSISTPKQSQLGGFSDPFFEYFFGQGGRNIQPQPRAGLGSGVIITPDGYIVTNNHVVEGADKLDITLNDNRTFNGRVIGTDPSTDLALIKIDAKDLPIVKFGDSDNLKVGEWVLAVGNPLGLTSTVTAGIVSAKARSISALNPRSQKMGIEAFIQTDAAVNPGNSGGALVNTAGELVGINTAIYSETGSYAGYSFAIPTSIVSKVIADLKEYGTVQRAVLGIGYREIDSELAKEENLEVQEGIYVGEVYNRSAAMEAGIKEGDVITFINGVKIKNGAMLSEQLSKYRPGDKIKIGLLRGKESKTVSLTLKNSQGNTEITKIAGMDSLGAGFKELDAKSLREMNIRYGVQVIGLKNGKFKAAGMREGFVILEINNTPMKSVSDLESMYDSIVKSNQNQKVMFITGIYPNGKMMYYAVDLADMRQLKITKSITNRESASLDKYLQEIGREDLITVEEEVELAQRIKKGDHAALEKLTRANLRFVVSVAKQYQNQGLSLPDLINEGNLGLIKAAEKFDETRGFKFISYAVWWIRQSILQALAEQSRIVRLPLNQVGSLNKISKALSKFEQENERRPSPEELAEELDIPVDKISDTLKVSGRHISVDAPFVEGEDNSLLDVLVNDDSPIADRSLINESLSKEIDRALKQLTPRESEIIKMFFGIGCQEMTLEEIGDKFGLTRERVRQIKEKAIRRLRTASRSKLLKTYLGMAKYLYQILLISTLCLFLQNTSAQESTTGFENGNNQYVMRESNLSDMSKDKKIKPVTFGVEAGASIDMSGNDFSSFDLDLFAGYRSHTIKCFGLGIGLHSSFSNNRYYLPIYALFRCNLLSNKSLLFVDFRAGYSTNQMYKGENQGGFFGSAGLGMNLSVSKKFGSHILIGYNFYQISPFTDEKGTFQDMNGCHLVSIRLGISFMSDRLFIFDTTLRDGEQVPGCQLNTVEKIQVAKALETLGVDIIEAGFPVSSPGDFESVVEISKAVTWPTICALTRAVENDIKVAAEALRYAKHKRIHTGIGTSDYHIKYKFNSTREEIVERAVAAVKYAKKFVEDVQFYAEDAGRTDNEYLARVVEAVIKAGATVINIPDTTGYCLPDEFGQKILYLKEHVSGIDNVTIATHCHNDLGMATANTMAGIQNGARQAEVTINGIGERAGNTALEEIAMICKCHHNLQIETNINTQKIYGISRMVSNLMNMPVQPNKAIVGRNAFAHSSGIHQDGVLKNRESYEIIDPKDVGIDENSIVLTARSGRAALKHRLHLLGIELEKDALNKAYDSFLKLADRKKDINDDDILMLVGKERTANARIQLDFLQVTAGVGIKSVASIGLDIAGEKFEAAASGNGPVDAAINAIRCIIHRKMVVKEFLIQAITKGSDDVGKVHMTVTYNGNSYYGFSANTDIVAASAEAFIDAINKFIIMNTLFDKIWDTHVVTSVKGGPDQLYIDRHYCHEVTSPQAFNELRARNLKVFRPKRTTCSPDHNIPTLNQDKPIADPVSRNQVETLATNASEFGLAHYGLGNKKNGIIHVIGPEYGLTQPGMTIVCGDSHTSTHGAFGAVAFGIGTSEVAMVLASQCILQPKPKTMRINIEGKLSPGVTAKDIALFIISRMTTGGATGYFVEYAGEAIRSLSMEERMTVCNLSIEMGARGGLIAPDETTFGYIKDKEFAPKGKDWDKALAYWKTLYSDKDATFDKEVTFNAAEISPRITYGTNPGMGIAIDERIPLEESIEDSGKISFRRALSYMGFSAGELLMGKKIDYVFLGSCTNGRIEDFRAFANLVKGHKKANHIIAWLVPGSQAVLRQIKEEGIDLILSEAGFEIRQPGCSACLAMNEDKVPPGKYAVSTSNRNFEGRQGPGARTILAGPLVAAATAITGEITDPRKFLMIKKIDIITSTCIPLPQENVDTDQIIPARFLKAVSREGFGENLFRDWRFDKTGQPIRDFILNNPLYSGSILVAGKNFGSGSSREHAAWAIAGYGFQVVVSSFFADIFKNNALNNGVLPVIVSEQFLTSLFKHIFSNPQSTVTVNLKEQTITDDTSGESEHFEINPYKKNCLLNGYDDIDYLLSKKQEIENWEEKHSMVVEIMDTTLRDGEQTSGVSFARQEKLSIARLLLEDLKIPRIEIASARVSTGEYEMAKQLCEWAEKRGHIDKIEILGFLDKGASIEWIRSCGAKVMNLLCKGSEKHCTFQLQKTVQEHVEDIKQTIKKAKEVGLKINLYLEDWSNGIQHSPQYVFHLMDALKNEAVERFMLPDTLGILNPLQTLKFCRAMRRRYPDLRFDFHAHNDYDLATANTFAATLTGIQGVHCTVNGLGERAGNAPLTSVVAVLHDHVKATTGITENMVNKVSRIVESYSGIRVAANKPIIGESVFTQCAGVHADGDNKNNLYYNDLLPERFGRKREYALGKTSGRANIRKNLESLGIELDDESIKRVTQRVVELSDKKEMVTPEDLPYIISDVLKHETIAQHVKVINYTLNLSQGLKPVAIIAIEVNGKTYEGASTGDGQYDAFVKAIRKIYKEQLGRTFPSLTNYTVNIPPGGHTDALVQTVISWDYNGNILKTQGLDADQMEAAIQATIKMLNLIEDKELNIQDNMKLHIAVLPGDGIGPEVVEQALNVTKAVCEKFGHSLEYQIAPVGACAIEETGLPYPDSTHELCMRSDAVLFGAIGSPQYDNNPNATVRPEQGLLAMRKKLGLFANIRPITTFPGLIHKSPLRSNIIDGADFMCIRELTGGLYFGRPQGRSEDGNIAYDTCIYSREEIVRIVQLAYEYAMKRRKKVTMVDKANILATSRLWREITQEIASEYPEVETEFLFVDNAAMRMIQCPKSFDVVVTENMFGDILTDEGSVITGSLGMLPSASIGLHTSVFEPIHGSYPQAAGKNIANPLATILSAAMMFEYAFGLKEEALSIQTAVSKSMNAGIVTEDIAGTSTKSYHTDDVGEWIVEWIKSHMKTNFFYLAVAIATTSLFCYSESAGAQAIIVEEDVSVTEVVPTKPRYYSDSHKNNWFISIGAGGQTFLTEHVGDAQYTLAMDFAIGKWISPYLGFRLSAMGGALHTNWPLAEGVMTHMRYAAVYGDIMWNMFNTFHGYNEDRVFSIIPFAGAGGIYSFHNTPYNNKTYAFPITAGIKLNFRLSHYVDFFLEGRGNLIGDHFNGIVEGTEVESVISAIGGFSIKFGKDRFKAYDAYADQMVIGDLNNRVNALRAQLNECESRVVECPPCPEAVVEEVTVIEPAACSQELTGVVRFTINSAVVSNEEMVNVYNIAQWMKSNPSCNISVIGYADKATGTPEYNKQLSQRRAESVVKLLTEKYNIDRKRIQIIANGSDSQLYPKNNNWNRIVVFSGSAQMKRNKKNSDFFSKKRSKYKLTFFNESSLEDVWTICFSRFGAIMTAILLIGLIVVAILSVIVGTPVKNLLPGYLKTEERIEMVDKILRVDSLAAEVQRRDAYIKNLASILTGEIKIDSIGQQADSLLSTTTDTLLPESKLMANYIKQYEQEEKYTLNVFTPTTPIDGKLFYPPLKGKIIKAYNPKEGHFGIDIQCPRNTAVSAVLDGTIVSAGYTIDYGYVVYIQHSNNYLSVYKYNSGILKNIGDKVSGGEKIAVTGWEDGKSSKQSCVAEFQLWHMGQSLDPEKYITFMRFDLLNRMKKQLAILGSTGSIGTQTLEVVAEYPDLFEVYTLTANNNVDLLIEQAKHFNPDSVVIANEAHYNKLKEALKDFPIKIYAGENAISEIVEAAPIDIVVTAMVGYSGLKPTIRAIEAHKTIALANKETLVVAGDLIKRLALEYRTPIIPVDSEHSAIFQCLVGEGDNPIEKIILTASGGPFRKFTAEQMAHVTKSDALKHPKWHMGHKITIDSATLMNKGFEMIEAKWLFDVSPQNIEIAVHPQSIVHSMVQFKDGSVKAQLGTQDMRLPIRYALSYPARLESSAPKLTLEQYSELTFEYPDFERFPLLRYAFDAVATGGNMPCIMNAANEIAVAGFLNDTIAYPDIARIVSETMEHIEFIESPEYEDYVHTNKLARNYATELVKSYQMETFLIKTVQLLLSLSILVIFHEFGHFIFARMFKVRVEKFYLFFDPWFSLFKFKPKNSYTEYGIGWLPFGGYVKISGMIDESMDREQMSQPPKPWEFRSKPAWQRLLIMVAGVVFNFILAVFIYSMIVYTWGTSYIPFKNAYAGMEYCESARNIGFQNGDIPLSADGVDLNYMSSETLQKIVDAKEVKVLRDNDTITIEIPKNFMLRLIDKEELFALYRIPSVVFEASPNTGAARAGLQKGDHIESIDGEKASSLNEMHKILESKPNTSVSVVYSRGSEVKTTEITTDSLGRLGIAIAPLSDSYAIVTEHYGFWESFPKGIELGVDKLKSYVSSMKYVFTKEGAQSLGGFGAIGSIFPATWDWEAFWSMTAFLSVILAFMNILPIPALDGGHVLFLLYEVITRRKPNDKFMEYAQMGGMLFLFALLIYANGNDIFRFFFKMDYIKITLKPGKEDSFHRFHPWVFSGAIYRFEKQPEEGDIVEVTDHQGNFIGIGQYQIGSIAVRILTFKPEEINEQFYFKRLQEAYNVRLSLGLLNGEYNNTCRLVHGEGDNLPGLIIDLYNKTAVMQAHTPGMHYARHQIAQALKSVLGNAIDNIYYKSETTLPYKAELDAENEYLLGGDAPNIATENGLKFYVDWVRGQKTGFFVDQRENRALLERYAHGRSVLNMFCYTGGFSFYAMRGNAKLVHSVDSSSKAIDLTCKNVELNFPGDNRHQAFAEDAFKFLDTMGDQYDLIILDPPAFAKHKKVLNNALQGYRKLNAKAFEKIRPGGILFTFSCSQVVSKENFRLAVFSAAAQSGRNVRILHQLTQPADHPVNIYHPEGEYLKGLVLYVEMASLLILASCATKQEKDDFDYTVESFADLEILRYKVPGFEELSLKQKELVYYLSEAAAYGRDILYDQNGKWNLAIRRTLEAIYQNYTGDRESQDFKNFEVYLKRVWFSNGIHHHYGCDKFVPEFSQEFFTEAVKSLDPETLPLTTGASVDDLLNTLTPVIFDPSVMPKRVNQAAGEDLIVTSACNYYDGVTQAEAEAFYNKMKNPKDETPISYGLNSRLVKRDGKIVEETYKVGGLYTEAIEKIVYWLEKAAGVAENEQQKEVIEKLIDYYQTGDLKQFDEYAILWVKDLDSQVDFVNGFTETYGDPLGMKASWESIVNFKNLEASERTHTISDNAQWFEDNSPVDSRFKKDKVKGVSAKVITAAMLAGDCYPSTPIGINLPNSNWIRHIHGSKSVTIENITEAYEKAAQGNGFNDEFVWSDTERNLMNNYLFQADNLHTDLHECLGHGSGKLLPGVDPDALKAYSSTLEEARADLFALYYMADPKILELGLLPSEDAYKAAYYKYMMNGLMTQLTRIEPGKNIEESHMRNRQLIARWAYEHGKADNVVEFAKRDGKTYVVINDYEKLRSLFGKLLAEVQRIKSEGDYESGKNLVEEYGVIVDQDLHNEVLARYENLHIAPYKGFVNPVYTPITDENGNITDIQISYNEGYAEQMLRYSKDYSPLPIYTSIPVVCKMNGIVSQNMRNLGANYKINFGLTLPLLKKIAEEIPADAQLANALWNDTAVRESMMLAPMLYPADEFNEDEAEKWVTNMPNIEIADICCKSLFRRLRFAPRKALSWSLSDKMIRQYTGLQLATAWLIDHHEINDISIFEQIADIALKKVADPNVNLAFPAVNYLKQAMHHDKLSVYILSNSKNSFENNELYSNLFDELNQEKELFKEFSRYDSNMPEEKSKETVKQLFIQFLESRNLRKTPERFAILEKIYTTTQHFDVETLYEAMIQNGYRVSKATVYNTIDLLLEANLVRKHQFGSNLAQYERVYNANHHHLICMKCGKVREVKDLDLMSNLNTRKFNKFNTSYYTLYVYGICSRCSNKNKKDKIEKKMKVDVLLGLQWGDEGKGKVVDVLTPNYDIITRFQGGPNAGHTLEFKGEKYVLRSIPSGIFQGGKINIIGNGVVLDPILFKEEAESLAESGHDLTQCLYISKKAHLILPTHRILDAAYEAAKGSSKIGTTGKGIGPTYSDKISRNGVRVGDIFLDFKKIYTTAKTKHENILRSLNYDYNIDELEPKWFEAIEYLKRFKIIDSEHVINHYLKEGKSILAEGAQGTMLDVDFGSYPFVTSSNTVCAGACTGLGVAPSKIGEVYGIFKAYCTRVGSGPFPTELFDETGKKIRDLGHEYGAVTGRERRCGWIDLVALKYAIMIDGVTKLIMMKSDVLDSFETIKACVAYRINGKETTEFPYSIEENIEPVYVELPGWKTDMTKIHTEKEFPQKFNDYIAFLEKELQVPIQIVSVGPDREQTIILSNKMAKIKPFKGIRPPKDFVEQVASRPYDVLNSEEARQEADGNEKSLYHIIKPEIDFVSGTDEHSPEVYQKAVENFNMFQEKGWLVQDNKEHYYIYAQTMNGHTQYGLVVGACVEDYMSGAIKKHELTRRDKEEDRMKHVRINNANIEPVFFAYPDNTELDAIIKQETSVSPEYDFVAPDGFGHHFWVIDNDKTIARITELFAQIPNLYIADGHHRTAAAALVGNEKARQNPNHRGDEEYNYFLAVCFPASQLQIIDYNRVVKDLNGLTPHEFLEKLKENFIVEEKGVQIYKPKKLHNFSLYIDGKWYSLTAKEGTYDDNDPIGILDVTISSDLILRDILGIKDLRSDKRIDFVGGIRGLEELQHRVDSGEMKMALALYPVSMKQLMDIADTGNIMPPKTTWFEPKLRSGLIIHKLEMNEKELIEACKNNDVRAQKLLYETFARKMMSVCLRYADNREMAEDFLQDGFIKVFSSIRSYSYEGSFEGWMRRIFVNTALEALRKNDLLRNGVELDALEPQQEADYSAVEKISADELMELIAQLPPGFRTVFNMFAIEGYSHREIAETLNINESTSRSQYTRAKRLLQKWIKELKMIDDQNFEKAIRTKLVQHESDVPDAMWSGIESRLPKRVPNKVPLYRRIMWYSAAAIVMGVIVTVALWQYPDKEISAPLAVNEDYTAPTITQPSISNLHSSIESPSVETPKFLPVSSHQSQSQTKQETQTDSKIEIVETNKMNESQVENRANNTKSEQYDSQSYRKKLEDFENDGKKLKEADLAITEPMKKSKSNGLKFGLMASNATSGNSKNPAKAIRTRNPLMMMSARRNPVYEFDHKMPLSVGATVSKSLAKNWELESGIIYTYLYSKYHSTNGNGSQELHYLGIPIDIIYRFARVKRASFYASAGGKVDFYLTGQQKDEGHDEGISGSGYKKLEHENVQFSVQAKLGAALTLYKQTELYLEPHITYYIENNSSIHNIWKDKPFNFGLTLGIRTGFMNTLKLVSILILLCGVLSFSGCLGDGGNTLSVYSTGSIYKTSTGTSYMFIDRAGISATSAELQGERLEVGDRILATTTIDFDNQGTQLAQGIYNATIAGVHKFDCKNYTFDNSISSFASDTLPTLYGVEPFLSYRKDDTILTFAYVKHDVENGDPSSLKLVQPKLYNPEAKTDTLFLIYEKGNIKDSKSSDYISFKLPQYPSDTDINVVVRYNAESSNLSTNNGDGTSKLFSITYNRPSTLNMFIISDGVSVRIPLSFYKNEGISIDFTHCNNYKRILSLFPYNTHKKRMKKLFFFAIALLWTGFSSFSKTLPLQGEFINPSHRYIQYIGRIGHKAPDAIRFNYPGVQIRASFRGTSLKMYAKPMSGFFMVKIDNAAPFKISFNSPSDSIVTLASALNDTVHTVTIMNVIEAFHRQPEFKGFLLDKGKNLVFPPNLPQRKIEFIGNSITCGYGIESVEASDPFTEETENHYYTYAAITARNLYAQHFAIARSGIGIYRNYNGPREGSPDCMPAMYNQTLFNDSSEIWDFSRYIPDVVCINLGTNDTSTPGYDTNRLYNAYLAFHKTVRNNYPKAKIVWLTGCMLHGESLSLVKNTLDRLSDTLHKAGDLEVYRFDMTPQTGELGYGASWHPSLLQQQRMADELTPFLRKLMNWTDMEKSAKIYVAGHHGLVGSAIWKNLQEKGYTHLIGRSHKELDLLDGVAVKRFFDEEQPEYVILAAAHVGGIMANSIYRADFIYQNLQIQQNVIGESFRHGVKKLLFLGSTCIYPRDARQPMKEDALLTSPLEYTNEPYAIAKIAGLKMCESFNLQYGTNYIAVMPTNLYGPNDNFHLERSHVLPAMIRKIHLGKCLMMDDWGAVRKDLSLRPVEGIEGTATTGAILTVLGKYGIYPDYVELWGTGKPLREFLWSEEMADASVYILEHVDFSDVKGDNPEVRNCHINIGTGKEITIAALAHRIREVVGYEGEIRFNADKPDGTMRKLTDVSKLHALGWHHKIEIEEGVQKMYDWYIADHTDLFRMKTALITGITGQDGSFLAEFLLEKGYEVHGTIRRSSVDYRERIAHLEGRPHFHLHYADLGDSMSLIQVVGKVRPDEIYNLAAQSHVQVSFDAPEFTADVDATGVLRILEAVRQCGLAETCRIYQASTSELYGKVEQVPQNEQTPFHPYSPYAVAKLYGFWIVKEYREAYNMFCCSGILFNHESERRGETFVTRKITLAAARIAQGKQEKLYLGNLSSLRDWGYAKDYVECMWLILQNDKPEDFVIATGVQHSVREFCQLAFHHVGIELDFVGEGENEKGIDRATGKIIVEVSPDFYRPTDVVNLWGDPTKAKKELGWNPMKTSFEELVKIMVDADMAKVAVERAGDEIRMNLAEYLEKGIVKMENYFNIRYEFDKRAVLQAIDEALLLGKPGYICVSDGVILSTVNRDPDYRQVVDGAMFSICDSGYVPLYLRWIYGIERHQYCGSEIFMDIVHMKRYKMAFLGTTQATLNGLQNNLSEIDPRIANMWFYSLPYKRVEEFDYPAIAEMLEKDGAEIIWIALGAPKQEIFMSKLKPYLKRGVMIAVGAAFKFYSGTDVNRAPYWMVRAHLEFLHRIYCEPKKQIGRCSMIVESLPKLLYQEWNRKRKRKKLAGKTEMKQLCKNNLGRGGQKSCQNRIIGLDLVRSCAILFVIAGHFFVLNTPFKNTDFGGFSMFLQAMSIPLFMTGVPLFLLLTGYLNANKTVSKRYYKGCIRVLASYFLFSLLTILFRKYYLQEDLTWAKWILKIFDFSAIPYAWYIEMWIGLFLLTPFLNMLYKAIPTRWQKQVLILTLYVMTALPDLLNRYGLHLVPGFWASCYPLTFFFAGSYIHEYKPRFESWKLWIVILLLCLINPVFNSLFVHNHTLIQIAGGPWGVFGTVIALAFFLLFYQTDFKLPVLRKSLTKISLLSLDMYLCCYLFDAMVYPYFMEHYFVNQSQFGIYFFVIVPILFIGSFLLAWVKEGTFCLVKRLMMKILIVHNNYGKYSGEEAVVDKMADMLTSHGHEVAFYRRTTEGVRESAVGKIKGFLSGIYSPSGVRGMRDALRRERPDVVNVHNLYPFISPAALFECKKAGVPVVMTIHNFRLICPTGLFMRDGLPCEVCLERGNEWSCVRYNCEYSRLKSIGYTLRNVYARWTGAYRKNVAAFACITDFQRQKLIAAGYDSEKIVVIPNFLPIPKLYENEVGKYVAFCGRISREKGVDLILEVARRNPYILFKLAGEVRDKGLVEDLPSNCELVGYLSGESLSRFYRESAFFVMASKWYEGFPMAILEAACYGKPTIGPAHGGFTEIIGRGEQAIGDLFEPNNLDDLERKVVSLWNRPDEIARLGEKAFEKLKREYSSEVIYQKWDSLFQKLIMLKSSMKNPKVLWVNPSFLDYRIPLYKELNNLYDGNFYLVYSKQRIPQRCIDKIEKTLGDNAIGLPREKQIKLGGRGDFANTGVSVPFPRGLYKLIKSVNSDVIIAEGFFQFTPWALWYSFIRRKPLIIAYERTAHTERHCPWWRKAYRKLVNKFVSGYIVNGVLTKEYLISQGVNPNKIFTGGMCADSTQLALNSSTYGKKERENLKKKLCIGNSGLIYIFVGQLIERKGVNYLLEAWREHSKRYPDDIMLIIGDGPLREAYIEKYGTDRSVIFAGAIDYSEIYKYYAISDAFVMPTLEDNWSLVVPEAMACGLPVACSIYNGCYPELVQEGRNGTLFDPLKEDTILNSLSLFHDVDLQSYGQESIKIEQEFSPKQTALNVYKAVSETIDKMHIVFVSREYVPTFRGGGIASYIKETAIGLVKKGHRVTVICASDDTNEESEYMDDGVSVIRLSGGDFVVSEKEYKSCLRKFRCLYRFYSYRKKILKRLKEIDNIDIVEVAEFGAEAFYLSKLHVPVVIRLHTPTLLDRNNAGMRPFSHKYFYDYWLGLQELKILPQFKYITSCSLSLKEWFKRYVPNLCANIEVVYNPIDVEQWINYDVNYEENTVLYVGTVAEGKGVGDLIEACHILRQEMNIPVTLKIVGKIGAYAMKLKQEVEANKYNWCIFLGNQPREKLKSLYAQSKVSCFPSWWENMPLVCLEAMLSGNIVVGSSNGGMNEIIEDGKDGYLIKPHDPRGLAICLRMALMENKESVSLKHKRAYNKIKNKFSMDVVLESLEKYYLNVKEQYEKSKSSMGMISVVIPLYNKEKQIAYTLQSVFEQTFQDFEIVVVDDGSTDNSVEEVEKFDDSRIRLIHQTNAGVSAARNRGIEEARGELIAFLDADDEWMPEYLATQYGLYQKYPECSVYACNYEFRDSEGKVTPTIIRKLPFEGEDGVLSNYFEVASCSHPPICSISIMVKKTAIQAIGGFPLGIKSGEDLLTWARLAVNEKFAYSRKVLSVFIETMSDMNISKAQMRAGSEGQVLVELLLLYDREKNHVLKSQLKKYIIRWYKIYAVIQIEIGQGHKAIKIAYKAMVFGGTVKSFFPILILGMLPNKLSRILFLKLRMYLLNYIYFLIITLLGLKFLTMKRGVMVNPLNREQKMVMDGPEMFWVLTFSTGLLALSAPGALDLMAIRLMVLEIFCIVGLFICKRSPQWSPAIVLYLLYIVWLVIGLSYSPAPGYGFRVILKYLYPLLIMLFASAAVRDKEVFLKAGLGARLVAVISIPVLIIPMLNWILFPGVFWYGTASAIHYITMCVFSLALFYYTDERKKNLLLCVLFMLPCLVWVFRTSIMGTTLALMTFFFFKYKMKSLPVIFVVLVLFVVAVFAIPSVREKMFKDSENVSIEQLQRGEISKDDIESNARFAMWEDLQGRFYNEKELMGSGIGSVQNYMYSNVVFGGLKVPHNDYVQMSCDSGIIGVVLYLLAVFVIIVHSFVVYQKYTDVSIKMCAIVAGSSMAGVALTMYTDNVVNYSMATLSYPFGFYGMMLGLIKGEKMTILICIPCLLTGGTEIQTLNLVQALVAGGHQVVTTCYFEYSDDMVVRFRKVGSEVVCLSSTGTRLNGWRGILFLYKGLRRVLKLYKPDVAHVQYMAPGAIPILLLRWLGVRQIITTAHTAADIYPNLRLVHFIQRHCVRAFTCITELAERSFFGTSRLYNENTPLSKRNHFTIYNALPPGFSIVRENRSFVRPITIGVVSRLEEIKGMDWVVPAFAQVKKRYPDTRLVIVGDGSLRVKMQRQAQEFDCTEYVEWAGRQPQERLTEWYRRMDIVLMPSRSEGFGLTAIEAMANGCVVVASLTGGLPEVVQDGEVGLLHEVGSIDDMANKIISLIATPELLQKYSSKAIRYVHRYSFERYSQLFNDLYKRLITTKRMKRLLIDINSIVPYYVTGKVNGIGRTTLELIQALAGIKNLPFEVVLYSQNMKGIGGRNTGLLFKTKHLYLPHREKIDKLLARFPIKECLTGYDIMHIPHNFEYVYSPEKCVVTLHDALFMKVQEEAFEHEKMKQIVPPFMRQCKHIITCSESSRRDIVETMGIEPEKITVIYWGIKHDLFFPQKDKLNIRDKLQSKFELSSPYFLSVSCNAERKRTDVLVRSYIALSREQTLSHDLVLVWGNPPLNLLKEVKNSSVATRIHFLKNISDGDLALLYNGAEAMFFPSSYEGFGLPLLEAMACGVPVITCHNSSLDEIAGNAAIYLTEPLFDSLIDVMGRLDQNTIDTEPFVENGIKRAAQFSWEKTAKETIGVYLDALKMIQILQIASGDFFSTYGGGQVYVKNIVDEMIRQGYSVQVISFVNKDCAVETRDYKGTMLYEVGSNGIDRLESLIVQIRPDVIHAHSHKAQVVEIGKKQHIPVIVTAHHGGIVCPAGTLLDCKDEICHIAVSHEHCLACCLRNIRSGKYWYPFMRLLPQNVYRSLGRGLSKLPFIPFVTPIGQAALSIERKQAEWHAIASDCTRMIAPCQAISRAMQRNGLSKEKITILPHGIPLPKEVPDFPPVINGKIKFFYVGRICYVKGLHILLEAFSQLDNENAELHLIGGVGNKSERRYEHSLKRRYAADKRVVWHGKVPPEKVFDMIRSYHVSSSSSSYLEAFGLNIAESLAMGKPVLATRCGGAEMQIDDGVNGWLVEPNNVDALAEKMQEISDSFTNYSTHLSTERVISIEEHCKSLIKLYETTAYMVVKIKIFFFTFWYFFLLLVFVSKKNKKMILLDIERWSKQYYYSSNIYFQLVYLLKFCPSFRNIFYFRCSNIPNIIQNIFCRPDPNFYIADYIPNTFNCIEGGGIFVVHSFGTRIRAKYIGYGCIFRQLTTIGVKSTDRPLEVPTILNNVDFGANVCCFGNITIGNNVVIGAGSVVTKDVPDNAIVAGNPARIIGYRNIMPQQESRVKKSLLNARVNLIFYFLTLILSFFSRKIFLDTLGADFVGLTGTLQNLLGFLNLAELGIGSAIGYVLYKPLFEHDEGKINEIISVFGYLYRWIGFIILGAGIALACFLPLIFPNTEFEMGIIFFAYFSFLASSLIGYFANYKQTLLGADQKNYVVTTYFQAVNIIKVLIQMALAYYTGSYYLWAIIELTFGIVYSFILNWKIRQVYPWLRSEVHQGKQLFKKYPEVMKYTKQLFVHQIASFVQFQTIPFFIYAFVSLEIVAYYGNYTIISDKISFFLISLWGSVSASVGNLISEGDRNKIMKVFWELTSLRFFVGGTCVFLMYNLFSPFIALWLGREYILHNTVLLLLLINFFIGVTHQAIKQFLYGYGLFSDTWSPIVETCIFVLVALLGGYLWGLKGILLSGIISQTTILCIWKPYFLFTKGFKISVAIYWGNWLKYMFLTILSWFIVYYIVSFIFDEQYPFINWGQLILYAICLAILFISIHFFLLCIGSQGMRDFLKRILRKYIARMELIQETKNDKKNEGGVTLRDIVELVFDNWYWIVLSVVICMSVAWFYLAMQTPLYKRSAVMLVKSENKSGNDMSAVLELNGGISGSGVENEIYILQSHQLMREVVGRLHLDVTYQVKNWLHYDQLYAESPIRVNFLDAYTAPVSMEIKPLNGNRFLLNQLKIGTEKSDNEGQEFLFGDTIISAAGRFIVEDIPDKISAYYNVPVEVSRIDLNTAANIYHSFISTSLAGERTTLVQINCVDSNISRAEAILNALIDVYRETIIEDKNRIATSTAKFINERVEIISKELGDVENELTDFKQKNRIVSIDAAATQFMSESSKMRDELVQLETEYAIARAVERYLTDNEHSKQLIPNVSGVGDSGLQNQITTYNEILLQRERLAANSGENNPLVKDLDNNLAAVRVNLTASMDSYLSTLKLKLKKAREVESQTLDHIESVPQQEKKALGIIRQQSIKESLYTFLLNKREENALQLAITEANIRVIESPFGSSAPVAPARRMLLMGAFIVGLIIPLAIQLLRLLWNTGVRGRKDIEDYTSMPILGEIPLMKDRDGEQAIVVEENKTSSVAESFRLLRSNMDFVAPQARVVMFTSTMPGEGKSFVSRNFAVTLAMTNKKVVLLDMDLRKRTLSKTLDLTMKNGVSTWLSGKNNSVSELVQSSNIHAMFDIISAGIVPPNPSELLMSDRLPVLVEELKKQYDYIILDCVPALVVADSSIIGRVADLTVYVIRNGMLDRRYLPELEKLYRENKFKNLTVVINGVEMESKKYGYGYGYGYGYGYGYGVEHGRKKKRNVIYKIAHRIGRIFRGMLNCYFRQMKYIPKILLAVILVGLVSCVPSKKMVYLQGADGLEQSPQTIAQDYELKIVPDDQLLITVSSKDGELLEIFSNSQVLGSTGASTTIQETVGLRVDKDGKIEVPILGEMQAGGLSRRELADAVENKLIEGEYVKDPVVNVQIKGFKVSVMGEVNSPGVQTISGDRITLLEALTMAGDLTPSGKRDNILVIREDGDQRKTYTVDLTSGEKVLESPCYYLKQNDVIYVQPNKSIGVKGSSTLSFISAGSSIISLVASVLSIVSMIIVLKDKMGYISILLLSFFISLGFSIFIIPRILLISFKKHLFDMPDERKVHKGIIPRLGGVSFFPAVIFTLSLMIGLNRIYGEELFPSIIGVSDTSVLSFGLSSLLLLYLTGITDDLIGVRYRQKFIVQIFCAILLVSSGLWINNLYGIFGIYELPPVVGLPFTVFTIVFITNAINLIDGIDGLASGLSGIALLFFTILFIYQREWLYAALAIVTLGTIIPFFYYNVFGNPNRGRKIFMGDTGSLTIGFILSILAIRFSMYDNAVLHRVPDAIVVAFSLLITPVFDVVRVILHRARFGKNIFSPDKNHIHHKFLALGFSHRAAMITILLISAGFAAMNLLLLTRININLLLFLDIFIWTIMQLYLTKKINRKVAGSKAMAFGTSAPELTVSIVSAINGSAELSIGNVVGSNIFNILMIVGVTAVVAPITITKGTLTKEIPLAILSCVVVLICANDVFLETGTENILNRADGLLMLCFFAIFLGYTFAIAHDNTGEEQAEIRPLSTWRCLLYIVGGLVALIFGGRLFVNGSSEIARSLGVGESVIGLTLVAMGTSLPELATSVVAALKKNPEIAIGNVIGSNLFNVFFVLGMSATITPLPLGGITNVDLFYLLAVSLLLFFAGRYYKVRTITRVEGVFMIFAYVVYTGYLIYMLMLNLLANAAAPLVKKLAPDRIKPKPTSKNKTLIMNLYTNIYYMMPNMKIHLRPEMLFFVQYDPKATWFGQSKPAFRGKRIFLQKQNMPPLKNASIVLFEMKTYPVVLTIAGSDSSGGAGIQADLKTMSAIGVFGTSAITAITAQNTCEVRDIQGIEPDIVRQQIEAVLDDLPCTTVKLGMLYSRATIETIADCLQRYPLRNIVLDPVMVSTSGCRLIEEEAISAVKTLLLPQATVITPNIPEAEILSGLAIDSEKDMEKAANRLFQAGCRAVLVKGGHLKGAESCDILFMPNSVPVRYTSPRISTRNTHGTGCTFSSAIASYLALGHRLTDAVSLAKKYLTQALQTGADITIGSGHGSVNHFFAPRVLTPLNPIKDENLYMKIYINQKEIEVQDNISVKELLDMQQIAIEGTAIAIDNKLVPKNEWNDRILTDGNKITIIRATFGGMKYIGITEEHPIEQENRLITALLDNGLDLIHLRKPKYSGEKTEQLLLSIPPRYYDRIVLHDHFELAEKYRLAGVHLNGRNPHYRPLSNDYIPTLSRSCHSIEELTDGQRYDYLFLSPIFDSISKKGYRSAFSPEQLTKAGKEGVINEKVIALGGITPEKKTAIKDWNFGGIAVLGFLWQEPTIAGVIRQLTRLRNDMLQFITHQTPRFGIIEGAVAALNGGCKWIQLRMKDAPIEAVRQTAQQLIPLCKEHEAILVLDDYAQLAADLDIDGVHLGKLDMPVSEARLLIGEKYIIGGTANTFEDIQGLVRQDADYIGLGPFRYTETKKNLSPILGLEGYARIMEQYRTNDLKIPVVAIGGITADDIPAIMETGVSGIALSGTILQAENPEKETKKIIDLLNKYRKAMNKLIIGGREFSSRLFVGTGKFSSNELMEKAIEASGSEMITVAMKRINMTQEATDDMLTHIDRNRVQFLPNTSGVRNAEEAVLAAQFSRECFGTDFVKLEIHPDPKYLLPDPVETLKATEQLAKLGFVVLPYIQADPVLCKRLEEVGAATVMPLGAPIGTNKGLRTRDFLQIIIEQSNVPVIVDAGIGAPSHAAEAMELGADAVLVNTAIAVAGNPVEMAIAFKQAVEAGRRAYEAGLGAQYHFAQASSPLTSFLDMDTKKIIKDSYPSSEKIYIPGKLFPIQVGMRKINLTDTVTVENGKRIHTPNAPVYVYDTSGPYTDPDITVDIDKGLPRLRESWITARGDVERQDDITSEYGRARRDDPSLDPIRFKNTPLPYKAKPGHAITQMYYARQGIVTAEMEYVAIRENLQNEQLGIKSHITPEFVRQEIAAGRAIIPANINHPEAEPMIIGRNFLVKLNTNIGNSALSSGIEEEIDKAVWSCHWGGDTLMDLSTGDHIHETREWIIRNCPVPVGTVPIYQALEKVNGKVENLSWEIYRDTLIEQCEQGVDYFTIHAGVLKAHADLVGERLTGIVSRGGSIMTKWCVIHNQESFLYTHFDEICEILKQYDVAISLGDGMRPGSIHDANDRSQFLELDVLGELTTKAWAHDVQVIIEGPGHIPMHKIKENMERELNSCHEAPFYTLGPLTTDIAPGYDHITSAIGAAQIAWLGTAMICYVTPKEHLGLPDREDVRNGVIAYKIAAHAADLAKGFPGAQIRDDAMSKARYEFRWKDQFNLALDPERALEYYKQGSFHDGNYCTMCGPNFCAMRLSQDITDCIEKEMINLFMTQTRNMKILILNGSPRSNGLISRILDTMANEARQHHAEVEVVPVCRLDIHPCTGCMSCRSRHNCVLPEDDAQRTLAKIVEADALVIGSPCYWGNMSGQLKILFDRLVYGLMGESPKGFPLPLHKGKKAVIVSTGSTPWPFNIWFNQTRGTVKALREILKWSGFSVQGVLQKGGTKQHHELTMKELQKCKTLIKRLTIMFSSELEKYSWEDITACIASKRSRDVEIALGKEHLQLDDFMALVSPAAAPYIEHMAALSRLYTQERFGKTIQMYVPLYITNSCTNHCVYCGFNHNNPIARIILTEKEIEKECRAIRQMGPFENLLIVTGENPRDAGVDYLERALQIARPYFSNLSIEVMPLKSEDYYRLTQSGLNGVVCFQETYHKDRYKVYHPKGMKSIFEWRVNGFDRMGQAGVHKIGMGVLIGLEDWRTDVTMMAIHLQYLRKHYWQTRYSVNFPRMRPSEGHFQPNVIMTDKELAQLIFAFRIFDHDVDISVSTRENAKFRDHIATLGATSISAGSKTDPGGYATYPQALEQFSVSDERTPAEVEQAVKAMGYEVVWKDWDKIFDRMNERYIRQTMIPEIGEAGQEKLKNAKVLIVGIGGLGSPISLYLTAAGVGQIGLIDDDIVSKSNLQRQILYTEAEIGQSKVECACRRLSALNSSTRFETYPNRFTPDNANRLVSAYDIIVDGCDNAATRYLIDDVCSRFKKPYVYGSISEFRGQVSVFNYRGGSRYSDLYPRPEVIPPARPGGVIGTIPGIIGCMEAAEVIKIITGYGEVLSGKLFLLDTQTLQHEIIEIMITREELIRIGRFNKPHGVKGELSFTFTDDVFDRTECSYIVCEIDGIFVPFFIEEYRFKSDTTALIKLEDVDNEADARPFTLLDVYFPKSYYKESNEDEAPGDYFIGFTVIDSEKGELGKIVSIDDSTENVLFEVEYNGRLLLIPAVDEFVCEIDEDNRKLYLNIPDGLLDLMKGWYFCVVVAGLLLSSCSQQVQERADGGKTSDTIVTEVPVEETCDSTGYRLYRKYLAAIGENPSYFQWKDFPKYLGAAYVDEKGHFVIQVLGDSAKARKQIVEAVGSDEVTVIPRRNSRQLLDSLYAYLCEIRRFRADEPTVAVFDTVCYDARDSWTIYVHVKALDYTMPEYVDSLYRYIGEFRKKVLLSRWVQVEGKYTVVTGVDLDEIKVKEMASFIIEGGHRLNGDLIPQGAKNEALEVLCATLLTPEEVKIYNIPDILDVNNLIQLLRDLGVTVKRIGLNAYSFKADKINLDYLDSDEFFQKGASLRGSVMIIGPLVARFGYAVLPKPGGDKIGRRRLDTHFLGIQKLGATFNYCSKAQRYEIKADKLRGSYMLLDEASVTGTANILMAAVLAEGDTTIYNAACEPYLQQLSKMLNRMGAHIEGIGSNLLTVHGVSSLKGCEHTILPDMIEVGSFIGMAAMTRSDITIKNVSYNDLGIIPDSFRRLGITVEQQGDDIHIPEHECYEIETFIDGSIMTFADAPWPGLTPDLLSVFLVVATQAKGSVLIHQKMFESRLFFVDKLIDMGAQIILCDPHRAAVIGQAHAHTLRATNMVSPDIRAGIAMLIAAMSAEGTSRIHNIDQIDRGYQDVDKRLNAIGARITRLMQYTSELKRLVLPEYGRNVQQMVDHCMTIEDKAERTRCANTIINIMGNLFPHLRDIEDFKHKLWDHLAIMSDFKLNIDYPYEIIKKENLHTVPESVPYQASPIKYRHYGKIMEEMLKKAESMPDGPERSALVSMLANHMKKLFYQWNKDSVEDEKILKDLREYTHGVIDLDASTYHLRDVREPVVQQRKSKNNSKKAGKMPNIIHIETSTSVCSAALSSDGVVQCHFENFEGPSHASLLGVYVKQIMDFSRDKGVKVDAVAVSSGPGSYTGLRIGVSEAKGLCFGLKVPLISVPTLELLACTTMFRNYFEEDVLYCPMIDARRMEVYSAVFDNALNDVVPVGAYVIDEHTFSDLLDNRRIVFAGNGSTKCKDVIKHRNAIFVEGIVPLATDMLALAERAFRNGQFEDVAYFEPFYLKEFIATTPKNKILMIQSMTGFGKAVVELPHKKITVEIKSLNSKQLDLSTRIPQQYREMEMEIRSEIAKRLERGKVDFFVYSEAIGKEASAQINIPVLEGYFQQVKEASIKLGIAMPDDWFSILLRLPDVMSSESQEIDEVELNALRKAVDQAISQLEEFRIQEGAMLQHLFEEKIANIAHLLQEVEPYEKERIEKIKGRIIDALNKIDNFDYDKNRFEQEMIFYIEKLDINEEKHRLDNHLKYFLETLQSGKGQGKKLGFISQEMGREINTLGSKSNHAEMQRIVVRMKDELEQIKEQVLNVMMEQRGKLIIFSAPSGSGKSTIIQSLLNRDLNLSFSISATSRAPRGTEKNGVEYYFITPDEFRERIANDEFLEYEEVYAGKFYGTLKSEVERILDSGKNVIFDVDVVGGLNIKKYYGNQALALFIQPPSIQALEQRLKNRATDTPEVIAHRIAKAEYELSFAPKFDKIIVNDILEKAQEEAYRSIRQFLDKMQPIKTAFFSGTFNPVHTGHLILANYLCEYEGFDEIWLSVSPQNPLREKLSSNNDRQRIEMLNMAVNGNSKIRTTDIEFTLPRPSYTIQTLEALRKKHPERIFTLIIGADNWLSFNRWKDYDKIIEEYPIYIYPRRGYDIDERSLPANVKLCHAPIIEISSTQIRQGISEGKNMNYFIPRPVYDYIINHGLYKNKDMDERIYSKNIIEFVTVSAEYCAFIERVPELEKEEFLDKIIKILPLLYLKATLLTPEEPEEDGFSEKFVTENMYESVRENIESLLGEDDSYLEVFQNDMKYSETPIIANVSEALADIYQDLKDFISVYRMGNEPQMLEALYICFENFITYWGQQLVNVLRALHNIRYTLDNDDDECDDNCDCGHHHSHSDNYTDIFGHQQENGDILDKLNDDLDMENDTPNKIKISKEIIATLPIETFPGKIVVIDNERDADNAVLQLNNERIIGFDTETRPTFKKGKSNHVALIQLSTHDTCYLFRINRIGFTPAIKNLLENESLLKVGISLKDDFCMLSRLNGGQFIPKNFIELQKFVKKYNIEDQSLQKIYGIVIGKKISKGQRLSNWEADHLTENQQLYAATDAWSCIKIYEVLKSGKFKSPIYKIQPSSLMKRYDIIALLLVIYLAVMAYFGRGMLLSGNYWEYFSIIGVTLLVIFILRWAMKRREKIREERRKKQDASERRTLRNDNISMTKKVLLTFLVIWLFSNTGSAQILKNTWIINPQLSGFNLGSTHTEDTGKETFDLGLKVEAGNFIANNLAILVGIGGDFAWNKEYKDNSIDIMGSIRYYTLTTLFLGINAGYTHAWYKPKGSDSQCRDYLYVGAELGYAIFVSHNISLDPAVYWKHSFTDKFNQYGIKMGLSVYFMTEKMNQLMKDVPAIRWTALILLASAMFFGYIFMDILSPLQELLQTSRGWSPDAYGHYAGSETFLNVFVFFLIFAGIILDKMGVRFTAILSGAVMLAGASINYFAVSNAFIGSGAESLMNRFMNLPLEWWNITPFYEGMPASAKMSAIGFMFFGCGVEMAGITVSRGIVKWFKGKEMALAMGVEMAIARVGVAVVVLGSPVLANKISPIDVSRPVLVAVILLAIGLICFITYAFMDKKLERQMGESGEEKDDPFKLKDLKLIFSSKVFWLVALLCVLYYSAIFPFQKYAINMLQCNLGYTAEQAGWVFFVFPLGAAAITPILGNFLDHRGKGATMLIFGALLMIACHLVFALVLPTLKGTTAAVIVAYLSIILLGISFSLVPASLWPSVPKLVDNKLLGSAYAVIFWIQNIGLYAFPMIIGAALRISNPGITDPLQYNYTTPMLIFASLGVLALLFGLWLKVEDKKRGYGLELPNIQKMKGLTSKEEEIMNYFWHKGPLFVKELLDFYDEPKPHFNTLSTIVRGLEEKGYVSHKAYGKTYQYFAVVSEESFKKRTLRQVIRKYFNSSYLGVVSSLIEEEDISLKELKELIEKVEKGKAEQMGAFFVYILKASVYLAILYLFYSILLSKETFYRYNRTALLLLIPLSFILPLYPVHTAVPETYSNTTILDRLPAISYIENESQSKIPIGIIAVLSIYLIGILYFITRYVCTIIKLLRLIRSGEKYTDSDGLSLVVISQSIAPFSWFGKIVISKADFQNHRREILLHESAHIRKHHSWDLLAADLCIGLQWFNPAAWLLKRELQTVHEYEADNYVLEQGIDAKQYQLLLIKRSVGSKFYYITNHFNHNKLNKRITMMLKKKSNRKATLKYLYVIPVALCTVSVFAHPEISDELNKVSSVDLSNLTAMIGSSENTATIKNKEIEISGCVLDIETNEPIVGATVLVKGSNTGTVTDLNGNFSLKTPIGKTLLISYVGLGSAEISCNDKDRQNLKIYLGESSEKNNSSKIIIVGNKTEPNTSIGTKGKINSITITTKDSVENNKQKIDTKGKISNINVDIQKDGSVIVDENNTRVFYDPIYILDGKKISKDKFKNLDADKIKSITVLKGEEAIKSYGKDGENGALIIQTKGNTATSTDPIKTITITKKDTSEDIMKNTLCIVDGKKISETELKNIDPNNIQSITVLKDEKSKEEYGATDKDCIIWITLKKMEFLIDFILHIDKHLIEIVQDYHTWAYAILFMIIFCETGLVVTPFLPGDSLLFVAGAITALPGIPLEINVLVLILFVAAVLGDSCNYAIGHFFGKKLFSNPNSKIFKQSHLEKTHAFFEKYGGKTIIIARFVPIVRTFAPFVGGMGKMHYYYFMMYNLIGGALWVAIFCYAGYFFGDLPFVQKNLKLLIVAIIFVSLLPAVIEFVRAKMKFRKVDQMKYSRLLFVGGGMLASVFAAFSAKKSDKPNIVFILCDDMGYGDLGCYGQKYIETPNIDRMASEGMRFTQAYSGSPVSAPSRACIMTGQHTGHGEVRGNKEYWRDSGEVRYGVNTDYAIVGQHPYDPNRVILPEIMKENGYRTGMFGKWAGGYEGSVSTPDKRGVDEFFGYICQFQAHLYYPNFLNRYSSRLGDTATIRVTLEENIKYPMWGAGYALRPQYSADLIHEAAIDWLDRQSGDKPFFGFFTYTLPHAELVQPEDSLLNYYRERLGETGVFNGSYGGRYNPVTHTHAQFAAMIARLDIYVGEILKKLKEKGLDENTIVIFSSDNGPHEEGGADPGFFGRDGKLKGIKRSCHEGGIRIPFIVRWPGHVPVAVNDHQLAFYDILPTFCDLIGVNHIERYGENRKDYFDGLSFKPTLLGKDKHQKNHEFLYWEFCETDQIAVRQGDWKLFVEKGKCHLYNLVDDIHEDCDLAAQYPDRVEDMKRIVFEQHVENPYFKVTMPQMNQSLYTPFDRILYIMTKPVGAICNLACTYCYYTEKAKLYRDSPKHIMSESLLEKFIKEYIESQANDHILFTWHGGETLMRPLDFYQKVVRLQAQYGKGRIIDNSIQTNGTLLTDSWCRFFKENNWLVGISIDGPQEFHDEYRLTKQGRPSFVNVMRGINLLNKHGVEWNAMAVVNDFNGDYPLDFYHFFKDINCKYIQFTPIVERIRQHEDGRILASPDEESIDGVTDFSVSPEQWGNFLCTIFDEWVRNDVGEYYIQLFDATLANWAGVTPGICSMAETCGHAGIMEFNGDVYSCDHFVFPEYKLGNIYTQSLIEMMNSPRQIAFGQNKRNALPQQCKECDFLFACHGECPKNRFAKTATGEPGLNYLCAGYHRFFKHVAPYMDFMKHELDNQRPPANVMQWVKQNPPDKMICETEVFLYIENIFKILSMKRKAFIRLLAVTALFPFSVTGNAYSETVPSKSYGLSRMTNVARFPVLDREMKVKYEGSIDKKGGNADWDWSLYQDKKGEWVIFDVAGAGCIYNMVQHRYLSSEEPVFRFYFDGEETPRFTIRLSEFGEKYPFTEPQASCYIGPLDNGRGPIRVVRSFVPMPFRNGCRITSSVKLEGPHRDKGQGGWGHVVYHSYPTAQGIETFTGKEDYSSLVRQWKQTGVDPKIGKDRMFRMSEKKLASGESLSIIDVHEGGVINSLKLYMADMNPDRLQDVWIRVKWDNHEEEDVLCPIGCFFGNSLGYNNTRYLLMGATTDGWFYNYFPMPFWERAHVMLENRSGETVTLGFVEVGVGENSYDREYSGYFRSSDYYTRKHTPGADSPIASIKGTGKMVAAHVTCYGERPHIITCEGDVRIHIDGIKTPQVESDGSESYICYGWGFPTPAECNPSGGYDGLSDNPWSMTRLCLGDSYPFYSQLDFNIESGESNNQYLEHLGIVFYYGQDKVSLVKTDSIDMASKKSLKRHKYKVEGDVSVEMLTSCFEGDADDVEVTAMVHKFTGESSFRVKVLSNNHGVRLRRCSDQELPRQCARVWVDGQDAGVWYLADSNPYKRWIEDEFEIPESLTRDKSVLNIRIVPESREEGCPVSWNEAAYEVFCYMEMARKKKELPLLEQVEITGVAAEGKALARVNDLVVFVPFAAPGDIVDLQLMRKKHNYAEARIVKFHAYSSLRVNPFCEHFGVCGGCKWQHVAYDYQLQFKRQQVEDNLTRIGKIPLPEILPTKGSTKQQYYRNKLEFSFSNKSWLTYEQLQTEQEFDCRNALGFHIPGMFDKVLDIKKCWLQDDISNRIRLSIRQCAIDNHYPFFDLREQTGFMRNIIIRTSSTGEVMLIVVFFEPDMVRIERMMQHIADTFPEITSLLYIVNQKRNDTIADQEVCVFRGRDYIWESMEGLRFKIGPKSFYQTNSEQAYELYKVAREFAGLTGTELVYDLYTGTGTIANFVARQSRKVVGIEYVPEAIEDAKENARINGLDNTLFYAGDMKDILTEDFIEEHGRPEVIITDPPRAGMHDDVIKTILFASPERIVYVSCNPATQARDLSLLDAKYKVERVQPVDMFPHTHHVENVVLLVRKEMKRVYTFGNGKAEGRADMKNLLGGKGANLAEMNLIGVPVPPGFTITTEVCTTYTQQGKEAVVKEIKGDVEKAIAHIESLTGTKFGDASNPLLVSVRSGARVSMPGMMDTVLNLGMNDDAVEAIAKKSGNARFAWDSYRRFVQMYGDVVLGMKPKTKEDIDPFEEVMDKVKEAKGIKSDTELQVEDLKELVKLFKAAVKENTGKDFPASPWEQLWGAICAVFDSWMNERAILYRRMNQIPEEWGTAVNVQAMVFGNMGNTSATGVAFTRDAATGEDIFNGEYLINAQGEDVVAGVRTPQQITLEGSRRWAALQGISEEERATKYPSLEEAMPECAKALIETQQKLEDYFKDMQDLEFTIQDGKLWLLQTRNGKRTGAAMVKIAMDMLRAGIIDEKTALKRMEAQKLDELLHPVFDKDAIKRVKVVAKGLPASPGAATGQIVFFADDAEAWAEKRKKVIMVRIETSPEDLRGMSVAQGILTARGGMTSHAAVVARGMGKCCVSGAGEIKVDYKARTVEMGGKIYKEGDWISLNGSTGDVYDGQVPTVDADMSGDFAAIMNLAEKYTRVDVRTNADTPRDAAVARKFGAKGIGLCRTEHMFFEGDRIKAMREMILSKDEEGRRHALDKLLPMQRSDFEGIFEAMDGLGVTIRLLDPPLHEFVPHQLATQKELAEEMGMSIDEVKLACDALEEFNPMLGHRGCRLGCTYPEITEMQARAIIEAALNVKAKGIDVHPEIMVPLVGVVEELRMQAEVIHRTAAQVFEERGDTVAYKVGTMIEVPRAAVTADQIAEVADFFSFGTNDLTQMTFGYSRDDAGKFLKIYKEKGILKTDPFEVLDQKGVGQLVRMGVEKGRSTKPSLKVGICGEHGGEPSSVKFCAKLGMNYVSCSPYRVPIARVAAAQAAIEDMYFDLFYLMKQRYLKTGELNFSRYEFLITVFLLSYERVDIEGIMKKTLLFISLLILSVLSTQATRPKYVFYIIGDGMGINQVNGTEMFYGELTSKTGPLPLLFSKFPYTTFVSTYSANRGVTDSAAAGTALACGEKTNNNTIGVDADSLPIYSIAVAAQKKNIPVGIITSGEIDDATPAAFFAHQINRNNRYEIGVDMLAAGFDFYAGDKFTQPSPEGKKSLYDMIPKANYTLALGIQEYNRQSQVASKMILFPQKDFPYAIDRKPGDICLADLTRCAIDFLQQKGNGFFLMIEGSKIDWAGHSRDGATNFREIKDLEESVKLAYDFYRKYPDETLIIVTADHETGGVVLGNGNYSLNLQALQYQTMSGIAFTKEIENLRKQNTEISWETIQKALSHAFGFWSKLDLSPEQEAHLKKIYEETIHNQQGDLIKSLYENNEPIAEAAKTILNEIAEITWSCSSHTAGYVPLYAIGLGAENFQGKLDNTDVPLLIARIAGYEMLSQKISIGKVFVLSPNPRRDKFYYVTGRSSDLFYFRRLPNLIGLVALMRRMIPYSVDITGNFVYSPQLIEARKQVQEELLNVAQLLEIENKEIQHIVDTCKQIGLKCVTDGDYRSNGYTDFFHHLQNISKHETEPNDTSEENDKSVICGKIDFDNHFLSTPPVTEHFTYLTGIIGGDMYAKALLPSPMTLLAELIRPENRLNTGRYYPDIEVLSHDIAQTYQKVIREFYNMGCRFLQFSDYTWNLTGGCDIQQISEANNTDLASLSTVLARLTELCLNDKPDDMCISLQFDEKWWNTRDREKIAEILLSTQANAIAFDFGNRENENIDFSILKHCQSKDVILGLVSTSSSQPISTSTITHHIENAARLLPLESLHLSCQGNFRNLSGNSSISEQEMWNKIATMKNIAKTVWGEMNSIHEELKAVSQFLSEYATCLMASGVHTSRIVRNTARIAESFGFEAHMTLFHKTIIMTLRNKENTHVYSMVNTAKAGAINFEINSDLSALSWEAYDNHLPLDQLWEKYHAITSKPRLNAWLVWVLVGFANASFCRLFSGDWIAVAAVFVATLVGFRLKQVLGKHHINHYFIFTISAFVASLIASVTMWQQWGNTPDIAIGASVLYLIPGVPLINGIIDIIEGHVLAGTARLINAFLLIICIAFGMAITLLMMGGKLLMTEWQFIGSVAADAIGAAIAAIGFSVISNPPRRVIPCTAILAAIGHSIRFVLLQYAGLDLASASFIAAFSIGLLSHFSAYKLFCPATVLYIPALLPMIPGMYAYRTVFSLIKFLQSSNNDNEAIHYLLEIFKNGITTASVLFALAVGATIPIFIFYKRAFTMTRASRRIKKMKKTILSTLCFLLVSCFMFFADAGTRIVVLGSSTAAGAGVSDSNRAWVNQYRTYLQSIDPTNTVTNLAKGGYTTCAIMPTGTDPYNTGNHILEVDTERNITKALSLSPNAIIINMPTNDVSNGIPVATQMKHFATIIDLAKAAGVKVWITTSQPHNFGEKYDGPYSEEHQPDIWKQAARDQFKELTDSILNKYGEYALDFYTPIATEDGYSFIRPEYDSGDGVHLNDAAHDILFNIVKNANIPEIAGSTPVEISTTPIYINFGPAEAGLDSWNNVNNQASGYRVDMLNDSTGNATTVSIEITTGFTHAATNGSNSTIWDMNTAISTSNFSSNGENPVLTISGLNPTATYSFQTFGSRAGDGNRETTYTYAGENSGSATIDAASNTSSVATVKGIKPTAQGVVVLTIGKSSNNTSGFSYINAMRIVAEKGEPQPDVPEGVIRVDVAGTLSSLLPATTDTITTLILQGDLNSSDIKTIRELPSLKYLDMLNSKIVSGGEAYLNGMKTVENVFPKEMFLSNTVIETVILPKEAVEVAYHAFFGCSTLKKVVLPETVRRFGNDVFSGCTNLEEINMPAIAESLGTGVFYNCKKLTSISIPEGITILPGGTFYGCSTLESVTLPSTLEKIDGDWIFANCHALKAIAFPKTIQSISPGTFYDCRSLSTIECKSLTPPVTATGNGDSPFTGAFKPENCTLKVPFTSISVYKESSIYGIMNTIVPLANITADNEEVSPETTDLLATAKKITISGSTPDALEIQALFASNEKVTSIDMTGVIEYFEVPVAANPNCLVYAPASAQVENNNVVINGTAKKIVLTDAMPFEAPTAFHADAISYTRTIEESLTTNAQETTGWRGIVLPFDVSTIQARNKAGEQIELSAYNAEGEYDTSKNPFWLRELTTEGFAATQTFSANTPYIICFPNSSELDEHINIIGDVTFSASNAEITTTPAFNAVEGKDFDMIATLQTVSATEGIYAINNTGSSFVNNSRNIAPFECYVICKQGSTDAPDSFDLPAKLPTAIDNETVTGSKIYTADGNLVIISNEPTEIAVYNITGQMVLMQKVEAGKTIVNDIPHGVYIVNGQKIILMNEMDCISPSLPRFDSSSKIEDWKDSINFLTVRINPFTPRGLPQTPRNNATEQDRRKELWDSPCSNKTSPYFFRRQVPSRPYMKKTLSLLCAACIAVGMQAQTYMVNDFESGLNGANAAWGGTAELIDNPCSSSDNSSTKVLKVVSTEFANVAIPLNLPEGKTLADYTGVRLQLAVLEGSENITWVGNELGLVDNDTQEKTFQVAQNSWGDATYNTWMSLDFNFDETILATYLDGNHASTSLLIKVGRQAFNYAIDNIRLIEKEQVADPNTIFTFETMDLGTTPRCGMPWSGSCEVAENPYTTGINTSSKALKVNGGECSPVTFTEALPAGKTWNDYSGIKLQVCFLESGFEWCPIEMGVRTDGGSHIKFGYTVDASTGQEGTGIGDYTPGEWLDVELKIDPAMITDEAKSVRTMYLRLMKSDLSYLYDNLVLIPSSSTGAVSEVVTDDVKVYGANGCINVDLQKDMQVTVYSVDGRIVSSQMLSSGRHTVEVPKGIYIVNRTKVAVFMRKLLSSVFLFFVLIASANDKFLVNDFESGLGGAGDAWGGVCEWIDNPLKDVNNSSSKVLKVSSSEFAATSIPFTLPNGKVLTDYMGVRLQLAVIDACGENIHWVGCDLGVQDNVGNKCWPGSASWQTGELNTWITLEFWLDETILSAWLAGEHTDELSLLMKVGRQKFIYIIDNIELIEKAEYVGDGTQNYFGVNLSGAEFGGIYPGVDGTHYGYPTYKDLDYFKGKGLNLIRFPFRWERIQRVMNGPLDATELSKMKTFVQAAEDRGMPVILDLHNFARYSFDGGKTYTLIGESSNLTAEHLADVWRKLAQEFKDYNNIWGYDIMNEPYSMHPSAPWVNIAQVVIDAIREVDTETPIIVCGDSFSSARFWVEYSDNLRTLVDPSDNLIFQAHLYFDKDYSGQYLNSYDADGVTANTGVERAKYFVEWLKRYNKRGLLGEYGVPDDDPRWLETLENLLIYLRDNGVPGTYWSAGPRWGDYKLAVQPSNNYTVDRPQMSVLEKYTVTAGNESGIEERADISGSGLKVSCMGREITLKSEKPCEVSVWNLSGVLVHKVLVLPNSPVYLTLLPGFYMVEHIKIVVNMGYKSFCCLLLLLTGNVSLRAQGIDDISPMAIYNIGLVGCDSIGVNVLKTFISTGEARCVAVFDEKTTLAESTEREITSIQDKAPLLYNDYCKMLDRRDLDIVLIAVSKEEQDKFFLKACEYDKNIYIEISQCLSPEEIQPLVDATHRMSGVVQVGRSSLGVNNMIARIKDFLSFLSGLKDKTSYPIETAVCLEMKKVLLKILFIFFPIILFAQNNYYDVVVVGGTPGGIMSAIAASREGKKVVVLERSAHIGGLPANGLGATDIATRGATTGLFREFVNYVLDYYIEKYGKDSEQVKVCSDGYHFEPHVAALVFEKMLEPERKNITVLTMRQFDSETKNVVMDGAEIQCVRIYNRDTKKWEQYSGKVFIDATYEGDLGAAAGVPYSIGREGKDEYNEIGAGRLYKLWLGPELEGTTNEGDGNIQAYNYRLCLTNDPSNRILPEKPKRYNRKEYLSLVEDVYTGTFAGVEMLSVTPEMQVANRRHIENGGTTQIPGDPWGIAKITNMVDLPNGKTDANNQHLALISTDLPEENWQWPEENWQWRDRFAQRLKEYTLGLLWFAQNDEALPKAFRDNVREWGLAKDEYIDNGNFPRQVYVREGRRLHGEHFFTANDAYPVAKGKRPPLYSNSITASHYALDSHAVHKREKGKIALDGFFNYQASVYTVPFGVILPKKVNNLLIPVPASATHVGFSTLRMEPCWMALGQAAGIAAALAIEQNKSVKELDIEDIQAELLKEKTTLMYFKDITVDSPDFEMVQYMGLRGYITDWVADLDRPMDRDTAKSWSTMSGITIEKFEGKSRRDILQAVYDLIRMRRIIGFVTMFFLAVTVVFGKSQENVIDITFNKLGAVYHKNESGNAVCKVIKANNDITYEVVVEIVDIDKKPIGYKKTYTLSSPFERYYYVPFQFSELGYYYLSVSFLHGDKVIFSKQEGFGVIPDVTLTKKDYDSPFGVGAHYARYGDWRVAEIQQALGIAWVRDVARWKDFIGTARNTPDPFIDYLDRHNICWLPILDYVDANHGWRDENGIWRWDEDVTNIKKYVEMNENRILVYESQNEPSNFAGWNKRWPHPQGQKWRPQGWGVPFTDLVKQMHDSIKAVNGDIKLIWPGEEEWIEYFDDNREDVANHIDFTAIHPYILWRKYPETSPFYDGFYKIQKEMLKKRNIPTEIWVTETGWTTYLPDSIRRHFPPVTEYQQAQYLVRNYLVQLYFGAGKMFWYELVEEPFGVHHPESGFGILRYNTMLTVKPAAVAFANMVNNYRYLKPIGKYLAKDRKTYGFIYENEKESGAPVLSIWREADEKEELIPVKYTKSLTGVDIFGRTIEIPIIDGMAHLPLSMSVLTVSGFDMDDLKNLYEPKEQYMRNLLWILSGVLLVTACNNISSSDGNEDVLSFVNPFIGNADNGHTFPGACVPFGFIQASPETGNDEWKYCSGFNIADDSIMGFAQNHLNGTGCPDLGDVLIFPFSGDVKNGIYKSAYDKATQTASPAYYKVKLTDSDIDVEVTATQRTAYYVCTYNSDAPARMLLDMQSGVVYNQDHLKTHVLYADMNMPDNWTITGHQEVKNWVRRHFFYVVKFDKPYTVKEVLPAREGEKAKRMILEFDLEPGESVQIKVALSTVGIEGAQSALLTESPDWDFEAVKKESQDLWRELLSKVSVSGTKEQKTNFYTSLYHLYIQPNDIADIDGKYRGVNDSVFVSKSGTYYSTFSLWDTYRAAHPLYTILIPKRVPGMINSLLDYQKVQGHLPVWTLWDKETYCMIANHAVPVVVDAYLKGVKGFSPEDAYNAIKASLTVSHKKSDWETYDKYGYYPFDITTVESVSRTLESAYDDYCAAQMAKAMGKDKDYEFFMKRASAYKSLFDPGTKLMRGKDSKGKWRFPFNPFLLSHAASCGGDYTEGNAWQYTWHVQHDVAGLIDLMGGKESFAMKLDSLFMLDTIAENTGFVSDVSGFIGQYAHGNEPSHHVVYLYNYVDQPWKTQELIPEIFERFYKPKPGGLCGNDDCGQMSAWYIFSSMGFYPVDPISGEYVLGAPQMDKISIQLTEDRAFVVEAKNLSRKNKYVKSVELNGKPVRGLTIKHEDIMSGGHLVFTMTDEPVKRVLKMKKICSSIFRVLVIPYVMCGFVAAQNSYTLNGLSELKEFTAGSVEETVENLTLIEPEGSEMIPESEILKLTDRVKKITGTLTMEGLSQLTTTTGLIDVIDCSEAGFVFRDCPVLSDMDAFADEDKFSVIHGDFIIENCPQVMTGAATAHLDKSFSKIREVQGDLKLTNITTAMNKPQKIFPYLEKVEGDFVVDGCSRLYYFTNGDNTENMPLTYIGGDLVLTNNRSLQRLNGFGSLKHLGGNVSILDNGAIPEEPSDDNVIGFCKIKYYEMAGILDEEATVQLGRSTSLIDFNSLSPCPYEVVEDISGTFKAVPANRFLNSIGMNTSINSRGENVNTTEEIMRYLGARWIRTSVGGSVSSLTNLPETSLPGAGTSIASYKQLYDNAGIRFSAGLGAGGQERNIPNLINNVKRIIDATSPDAIIAIEGNNEPNNRNWYVIFEGEVGGGNKEGKNNWKPVARMQKKLYEDVKADPVLGKDGYNYPVWSLTYGGASGENVGLQYLKVPEDDMAVPEEFRGVTFADVANLHNYFNHPSFKFPQNNQTWRAAEPSTNVPPGCDVLYRHFGVTWLNKYKGYLTDEELEALPRVTTETGSTISDAVTEEMQGLLYMSLYLAQFAQGFDYTAMYLLTDRRDESGNQSFGFYDKFYNPRQSAHYLHNLTTILKDDKDIDEPGELTYSITGRTITVHDLLLQKNNGTFELVIWGEKYEGGSDRITVGFDQTYDEVWVYNPTKGTAPEMVLNNVNSIELDISNHPYIIEIGEHPESSVEDMKNDDFQIRAFPNPVIRNLTIYSDTEIGKVSLFDMMGNCVYTGRVYDKVYTVDMDNLPAGAYILSVLDESGNCIKKQKVIKSMKSMIKNRLLLVTAICFLFAGTSCQYDEIVDIPYPESLVYLPIAVNGSISPDGVYTIEEGASTAWVSPTPGQPMKYTVRNADNAFVIPLGIYRSGTGKTIKGSVNVSVMLNADTVQTLIDNGVLTDVEVVPSEYVLQIPQNIQIPDGKNETTFDVSVALDFLRKDAPKKYAMGIVISDENNRVNKQLNTGIILIDTKITIPVATFTTQLDGSSFDTFVFTNSSLYWDFFSGEEPFSWDFGDGSAISHEINPKHQYGAVGDYNVTLTVRGITGETVTVTNTVSVKSNMKPYKIPVIVGLLFSVVFYSCDDLLDPKAETNLTEEFANVSYNNTLARSIGLYSYLPDGLSYLDGAMMAAASDEAEYTLETASIHGFNVGSWNANNNPDGSAWERNFEGIFAANLFLKESDEVDLDYLKYDPTKQQDYQNRLNNIHRWKYEARFLRAYYYFELVKRYGGVPIITEPLGLKSDLSTFSRDSLSACIRFIVSECDSAAAVLQAPDRMTDVANNLGRATKGAAMGLKCRALLYAASDLFNKPEEWAPGYTHKEYISMQDGKSQQERWEEAAAACNDFITTLGNKYPMDEYRLIRDYQNGEIIFDRRYGSTNTFEKNNYPVGYNLGQSGNTPSQNLVDAYEMIDGTPFDWNNPEHKSNPYANRDPRLAMSILTNNVEFKDRTIEAWTGGRDGKGVIHATRTGYYIYKFIDPNLDLLQNRTSVHHWVIMRYAEILLSYAEAMNEAYGPTGNVGYRLNAVRALNQVRNRVGVEMPAVPTAISKEELREKIRNERRVELAFEDHRFWDVRRWMIAPETLGAPLRGVEITKISDEEFEYNPIEVEKRTFEPKMYLYSIPQADLNTTGWVQNPLWMINMKIKKDCLMKHKIFLLVQGLLFTGLLSAQVVHTDSTFSEKMVPIAYGERAEWEMTGAISSVKGDEMSKSFTTNVANTLYARLPGLTVGQQSGEPGNDAPTLHARGISTFGTGRDVTIIIDGFPSTLELFQQLTPQEIESVNLLKDAASAAIYGNKAANGVLLVKTKRGVNAPLELKLGIRFGMQQAMRLPDFLGSYDYAQLYNEAMVNDLGPGSEVYSPADLEAYKNGTDKYRYPNVNWYNQLLRTLSPIADYDLSARGGSDVVRYFVLLNVATNKGLYKGTEKESDYTKDFSYTRYNFRTNVDVKLSKRISSEFTLGGSVEDRVNPGRVRNDVSGEYSTNVFNLMAKLPPNAFPIYHENGQIGGNSAYYNPWAEITETGYYSTNKRSAQLSAKLIGDLGMITPGLSISGAVGFNTIYKSYTIASRDYARYDMSGQQFGETSSMSISESAYNQWRNFVVHGFVNYDRVFGEHHVDAMLMGGYEEYNVSSTDLPYKDIVSGGRLTYSYDKRYVAEFSFAYSGNDNYARGKRFGFFPAGSLGYVISNEEFLKGNKIVDYLKLRASYGLTGNKDNGSTRFPYNQYYTGGNYYLGQSNAASYYYVQNYYANPDATWEKDRKFNIGIDAVLSDRLSITADYFKEKRYDILTMPYDVLPSFVGFKRPELNIGRVSNQGFEAVVRYTGKETKDLTWFVEASAWFARNKILYNAEAPQNYAYQYRIGHRVDQPFLLEALGFFNDQNEIDSSPKQTFAAVQPGDLKYADLNNDKRIDSEDFKAIGYTDVPECTLGLHAGLTYKGFDFDVLFQGALNRSVYWSGSYFEAFQNDGQISSIALNRWTEDTKSTATYPRLSASNNLNNYQSSSFWQKNGDFLKLRSLEIGYTIPKNLTRKIKIEGVRVFMNGTNLFSLDHMAGFTDPETMTGYPAMRTVSLGLSVQLMYLKNINLKRLKQLVSPLLILLVLVLPVAVVSCEDMMGNYLEKPPGGDVTEDTIFSSRTQVETFLTSIYQMGIHSNLGYASANSNVYSNRDENIFAGACDEAETCANWYRMNWWNEGSISANRTDDSRFDYRFVAIRKITVLLDRIYDVPDITPEYRDQLIAEAKLIRALNYFEMMKRYGGMPIIRERLQLDDNLKIPRASLREMLFFILQDIDEAYPALLDNALQNLRGRVHKGVALALKSKVLLYAASPLFNTNEPYMDFGTNNNLICLNEPKNMVWWERAAAVADSCIRWAETNGCYLITDQGVDANYQYSWEVYDNPEIILAEKAAQGMGCWNRPWSGIIPGSIIAGSSGTNGTTPLLNFVRKYEDRDGNKVEWNGGDDLQAKLASLDRRFAQTIAYNLSWWNSQTPEVQLWEANEELGVAAGKHINDCYGGFWLHKLVSPSIMRPDNQEPVPNSTLFQLNEIYLNFAEAMNEAYGPDDKHGYKYSAREAINIIRERSGQPAILSGSGIYSDFRELVRNERAIELAFDNHRFWDVRRWMIAEQEGVMSGAMYGIKIYWINSSPQEFRYTPYLYENRTFTKKMYLHPFSTNEVNKGYLIQNPGYMLPWKNLFGMYGRGHFCNKLKRSILLLFLLGMFPYAWGQQTNVSLNLRNVPIKSVLSQIEKSTNYYVFFYTDNLNSELSKRVNVTVNNTPVVTVLNQIFSTTNISYEIKNKRQVSLFLVEKSSPKSKAQAVKSNKIQITGTVFDANNEPLIGASVRVLGTTIGSMADINGAFKLEVSPGDVLEASYIGYNPQQVKVGSQTRFQFVLEEVANTLDDIVVVGYSSQKKETVTGSISMVTTKDLLQSPQANISNALGGRIPGLLSVQRSGEPGQDMSTLRIRGVGTFASDAESQNPLIMVDGIEVNNLNDIDPNEVESLSILKDASATAVYGVRGANGVILITTKRGELGKPKISFSTNVAITNFPFLPEPMNSYEYARAYNEAQAYDYYSQLSYIPRYSEEAIEAYRTGSDPLFYPDINWYDYMLKDFSTQTQTNFNVSGGTERVKYFVSLGVFTQNGMLDTGIYDPGYSYQIAFRRYNMRSNFDINVTKNLLLSLDISNQMGNLQNPNWSTGQIMESLNSTPSNAAPGVIDNKVVTITDVFGSGRNPASPYTRGWKSKYENNLNLSGRFTYKMDYLLKGLSLRGALSYKSYSTETKTYNDRGITYDLRRAGDELIFVPSTDPGKLTYQGTNSRNIRIYSEIGAEYTGKFGEHTVTGLVLYNQGKYYNPTLKYNIPNGYQGLVGRVTYNYGNRYLAEVNVGYNGTENFAPGKRFGWFPAYSLGWVLTEEPYFPRNEVLSFLKIRGSYGTVGNDKIGGDRFLYLPSVYTYTGSNSYYFGEVGSSYVGYVGSNESKAGNPDLTWEKAIKWNVGADVKFWGDRIGLTFDYFMEHRDNILCNRNTVPTIIGISASNLPAYNMGRMRNSGWDGEISVGDRIGDWSYFVKANFTYAHNKILEQDEVIRNEDYLYRTGLRYGQFFGYVADGIFNSWEEVNAAGRPEYVMANNNNKIQPGDVRYVDINGDGKINDDDQVPIGYSNFPEIMYGISLGGSYKNLDISLLFQGATHVSNMPSRRIMRGFYEYTGANRDLLKSWSYERFVNNQKIVYPRYGVNGVGHNYLTSTYWLEDASYLRLKNVEVGYTFRQESLKKAGIGSIRIYVNGSNLLTWTDMLPGQDPEVANAGVTNSEPYPVTRVFNFGLNVNFMKTRAEYNILDFLKDDSFLRSVLLLTDDDVEFWDNYVLENPEKKQEIEAAKQLLSSMTFDDETYSEQEKLELLEHVNDQVKSIRRHRLYVGFYKIFAAACIVALLSVGVYSFFAPFTSDNQVATIEKNRSNFEKDTRLVIAGERTIPLEEGDDVLYGGGEATISSINQQDERYAVDVNDSKVEYNELIVPKGRRASHLVLEDGSKVWVNSGSTFRFPTTFEKNKREVYVDGEIYIEIAKDAERPFFVKTSEMSVRALGTRFNVMAYHDELAQSVVLVEGLVEVQSNDESKKKILQPDHMLTLASNSMDITAANTYDFISWKDGLLQFRSQPLSMILAKISRHYDLYIDCEKDIKDLKCSGKLVLFDDPKDVLETISRTISLEKADSKTVPMSYEMNGNTILLKKRSMDEVVFQRFVDGDDAAFTFIYNKYVDLLLQYGRSLGFEKEVLKDAIQDVFVKLYLNRRSLSEVRNLKYYLFRSLKNNLLDMLKVSVDTCSIDDYQYKFTIKWNILNELIAEEDKKEIEGKLNKLLSSLTGRQREIIYLRFIHELEYEEIASLMHMTIQSSRKAVSRAIGKMRKLKVAFLFIIICLWMKTNLLSFLVFTVFSFQSAYAVKYFVTPDGSEDSDGLSWETSTSLNAILTSTNLSEGDEIFVKKGTYVAPEGASFTCNRADVKVYGNCEGTESEKPVSYQLDNIETFLKGSGRRVLYFKTASYFVGFDISGGDAYNSTAGAAGRAGGVYIDHPDGMIEYCIVHDNYGSKTDGSIKGVGGGVYARGIVKNCIVENNIAIAADGKKPGVGGGVCLDGGYLLNSIIRNNHCVADESNNTSTGGNNGGGVSIKTGYVVNCLVEGNKIGGTANNANYGGGIDCSMVTEPAGEEIVAHVINCTVVGNDATSGRGGGIGFGNKGSSEVVNCIVVDNVARSESTPAGSNVFLGPESTAEVTYTIWPESEGGVGNLNAEPQFVDGTYMLQSSSLAINAGNNEAIGDYDKDLAGKERVVNGTVDMGAYEYDGLPSSVESSFIESDEPVIEIQYFTLSGLRLEKPQSTGIYLIKKIYASRRYEVSKMVFVYKMEKKFLLVGALLLAGGFSTMNADVIYVTESGSGDGTSWSSAASLEDALSWAAAGDEVFVAKGTYTGSFKLRAAAKVYGNCVGTETEPPTYTTAEGLETFLKGPGGKRVLYLDGKASEIYGLDISGGDASTETTGVGRGGGVYINNGGATLKYCNIHDNIGVDGSKNILGSNGKALKGVGGGLYVLNGRLENCIIENNIATTAPWEDTSKTWSTGIGGGICLDATEGNGCNPDNAIVLNCIIRNNSTTPTDDGDSFQSQGGGIAIKSGKLINSLVVGNSVNGSLNNQSVGGGVCCTEKDAYVINCTVAKNHVQGLGGGIGFQTTNADGMTATVANCIAWNNTCREDDYGTGNANIRFGNPQTDGKLPERVTIGAICVPEKTVSASAITSDPKFVDVAGGNYRLAEGSPCIDAGDDPAIEGYDTDLAGNARIFGTSVDLGAYEVTDGSAIDDVEIQEGEVVRTQYYTLQGVEVTYPSVSGLYIVKKTFDTKQIITEKVFITVKMKRLFLLAGVLMLIGGLSTMNAEVIYVTENGVGDGMSWNSAAPLADALSWAAKGDEIYVAKGTYTGSFALKVAATVYGNCEGTETEPPTYTSAEGLETFLKGDGKRVVLLDGGATIYGFDISGGDASEETTGIARGGGLYINSGGGVAKYCRIHDNKAIDGTKRLLEGNRIPQRGVGGGAYVWNGRLENCIVENNIATTDPWLKEDNSVWSMGVGGGVCLESSGDPGDAVVVNCIIRNNYTTPDDDESSYYHQGGGIAIKSGYLINSLIVGNRVNGSNNNQNVGGGVCTTEKEAYIINCTAYDNHVKGLGGGFGFQSQNADGMRAVVSNCIAWGNTCRDDDYGTGNANIRFGNAQTDGELPNRVTINVVCVPENTVSASAITSDPMFVDAANGNFRLAEGSPCIDAGDDPAIEGYDTDLDGNARIFGAAVDLGPYEVNDGSAIETAETNGGEIVRVQYYTMQGIEVTSPSVSGLYIVKKTYDTKKVVVEKNFISVKMKKNVLFFFFVILFPLVAYSSGNDAVANPAAVVEEGDVRFTVLTPRVIRMEWDSLHRFTDERSFIVINRNLPVPEFKKIIRGGKLTIRTDELELTYKLNTGKFSKENLEIKYLNKKRPFTWNPSVTQKQNLKGTARTLDRMDGTTFIKRNEPRHELQLEDGILSRDGWTLIDDSSGLLFDNSDFSWVKERENRTVQDWYFMAYGSDYKAALKDFTLFAGKVPLPPRFVFGYWWSRYWAYSDNEMRDVVSQFEKFNIPLDVLVVDMDWHETDSLFAKPDKWGQRKHWTGYTWEKRLFPDPDQFFDWAKSKHLKTTLNLHPASGIAPFESQYKDFAKRMNFDISTHENIPWQGSNKKFMSTLFDVVLHPIEQQGVDFWWLDWQQWVFDKDIEKLNNTWWLNYTFFEDMKRNTDKRPLIYHRWGGLGNHRYQIGFSGDAYITWNTLEYQPYFTNTASNVLYGYWSHDIGGHKFIEDDNVYQFDPEMYVRWVQYGALSPILRTHSNKDPSLVKEIWRYRDEYFDALYNAVRLRYQLVPYIYTMARETYETGVSLCRPMYYDYPEDERAYTYSRQYMFGDNILVAPIGAPMENGVSDVKVWLPAGNDWYEWHTGTLLNGGQELIRQFSIEEYPIYVKAGAVIPMYGKEVNSLDDNPKKQIIGIFPGAAGEFSIYEDAGNDQRYVAEYATTRVTSQLENRIQRIKIAPREGHYRGMNHSKDYLVRLYGAEMPRSVSLNGMKVNYTVLPNSSEWSYCGKEFMVSIPISNADCNKSYEIVVEFDKANVVDVNDGMIKQLKTLHRAIANRKFKYAGNYVVPEVTGFCSETNLKVSYDPDNFCHYINYFKTHFQEAMEITLKDDLVSPFAKMNKSLLTLSLIPIASVMHTYGTSHVPDNRPNIILFLVDDMGWQDTSLPFWTQRTMYNERYETPNMEKLAQQGMMFTQAYASSISSPTRCSLMTGCNASRHRVTNWTLRKNTKTDAVSNTLEVPDWNYNGIAQVHGTNNTFIATSFVQLLKDNGYHTIHCGKAHWGAIDTPGESPYHFGFETNIAGHAAGGPATYLSERNYGYDEAGNSTSLFSVPGLEKYWGTGTFMTEALTQEALKALDKAKKYNQPFYLYMSHYAIHVPIDKDVRFYDKYKKKGLSDKEAAYASLIEGMDKSLGDIMDWLEKNGEADNTIVIFMSDNGGYATGSGWRDEPLYTQNFPLKCGKGSAYEGGIREPMIVRWPGTVQPGTRCNDYLIIEDFYPSILEMAGIDDYDVPQEIDGISFVPLLKQTKNPSQGRSLYWNCPNIWGEKGPGIGPSCTIRKDNWKMIYFYETGEKELYDIPNDIEENNNVAALYPQIINKLSKELGKFLRQTNGQRPSFKKTGKPCPWPDEIMKKAFSFLVLVFLCGTFSARLSAELSMPHIFADHMVLQRNEAINLWGSASPKEKVTVELNGQKTSVRADASGKWYATLRPMEAGGPYTLIVKGKKECLAFDDVLLGEVWICSGQSNMEFRLHAAMNAEKEIADAENYSFLRSFNVKQEMSHRPLSDLQGEWRVCDSGSAGDFSAVGYFFARELYRELGVPIGFINTSWGGTDIESWMSMDAIDKFPKYKRLQDRMRSSQFEEYVRRSDENRAKFIESMKAEPGISEKWYLPSYSKDDWKEVSVPGLWSEEELVSLDGVVWQTCRFTLSENYVGKEAVLSLHVIDDDDITWINGQKIGETVGYDVRRLYSVPAGVLKESNEITLKISDYRGGGGLYGPANEIYLKVGDKTIPLSGKWKYKVSASNSDFDFVEYGPNAYPSLLYNAMVNPLVGLSMQGVIWYQGENNTNRAKEYYHLFPAMINDWRKKWGKDFPFYWVQLANYMDVVEVPSESLWAQVREAQTQTLSLSHTGQAVIIDIGEAKDIHPKNKQEVGRRLALHALHNDYGFSDVVCESPMPKTVRRVQDKIVVQFDNVADGLIVKNKYGYLMSFAVAGNDGVYKWVQAKVAGKDRVVLSCPDVIDPVSVRYAWGDNPDDANLYNSVGLPATPFEIKIEMMNRVFSYGLSILSGCILAACSTSPEAPYSLMCEYLSEPLGIDMSSPRLSWKIPVVKTDSVKSCRVWVSADSMAVINGSGQCWDSGELPSDIRRIVYAGDSLQSWTKYYWKVGYKTKREDRFVCSPLSSFTTGMMSPQEWGDARWISDGHDKDYRPSPYFRKDFEVRRNVKHAYAVIAAAGLYELSVNGSRIGDHFLDPMYTHFDKRVLSVMYDITPNLSEGENVIGVQLGNGWYNHQSTAVWFFDKASWRNRPAFIMQVRVEYADGSIETISTDSSWVTTDSPVIFNSIYTAEHYDARQEIEGWNTSGIDVSQWKNAKEVSAPTQRIEAQLTVPVKEIVRHNASRFVKINDTCFVYHFPENMAGTVELSVEGKAGIVLRLKHGEMLNEDGTVNLANIDYHYRPTDDSDPFQTDIVILRDGETRFTPKFNYKGFQYVEVTSSEPIALDENSIVALKMHSDVPEIGRFRSSSDLLNKIWTATNNSYLDNLFGYPTDCPQREKNGWTGDAHIAIEMALYNFDAITVYEKWLLDFIDEQRENGVYPCIVPTSVWGFDWANGVDWTSASIIIPWEIYRFYGDETLMRRMYPSAKKYVAYIESISKDNLTDWGLGDWIPVRSKSDVTLTTSIYYYTDVSIMAKAAKLFGYVDDAVYYEALADRIKESINDRYLDKETGLYASGTQTELAMPLYWNIVPDGYREKVAEQLNRRVVQDSCHIDVGLLGSKALLGALSDNGYPETAYRVATQETYPSWGYWIKNGATTLHENWRIDVVIDNSLNHIMFGEIGAWLYKTLGGLRIDESNPAFRHVSLRPYFPENLDYLEIEHETPYGCISTSWKRDDEGNILYEFDLPECVSATFTPLGDNVTYNGDTIFFTGSHKLKLETATHMEHVKLREKIGYGLGDAASSMFWKLFTMYLLFFYTDVVGISAAVVGTMFLITRIWDTFLDPFIGILGDRTHSRFGKFRPYLLWGAIPFGLCGILTFSSWGGDSEISKIVYAYVTYTLMMMVYSFVNVPYASLLGVMSPDPQTRTSLSSYRMTFAFGGSILVLFLIEPLVDIFSKMKIVDGVPSQAFGWQMAAVVFAILAAIMFFLTFSWTKERVKPIKEEKTSLKDDVKDLATNKPWWILLVAGIMVIGFNSLRDGSAVYYFKYYVEASDTFSFTFMSASVTLITIYLVLGQAANILGIMLVPTFTRLMGKKYTFLTATVGATIFSILFYFLPKDGIYGILVLQIIISICAGIVSPLLWSMYADISDYSEWKTGRRATGLIFSSSSMSQKLGWTLGGSLTGWLLFYFGFEANTIQSESALTGICLMMSIFPAIATGISALFISRYPLSEKRLSEISSDLENRREIAEQNKIMVQELERLRKEYEALISRKNEKCNKNNGVYVRYKYPVLTAEHAPLIWRYDFDEKTNPYMEERIGINATMNSGAIKLNGKYYLVVRVEGDDRKSFFAVAESDSPVDGFRFWDYPILMPETDIPDTNMYDMRLTAHEDGWIYGIFCAERKDPNARPGDLSAAVASAGIARTKDLKTWERLPDLKTRSQQRNVVLHPEFVNGKYALYTRPQDGFIDTGNGGGIGWALVDDICHAEVHDEVIINKREYHTIKEVKNGEGPHPIKTEKGWLHLAHGVRCCAAGLRYVLYLYMTSLEDPTKMIAEPAGYFMAPVDEERIGDVSNVLFSNGWIADEDGKVYIYYASSDTRMHVAESTVDRLVDYCLHTPADGLRSIESVRTIIAMVDHNKKILKMPRHVFILFLAWIVPALVEVRADSWSGKSVDFSHGDLCVSPNGRFLQHTDGTPFLYLGDTAWELIYRLNEPEVELYMENRRAKGFTVIQTVILSELDGSDGINRPLINGSPSTPDPDYFKWVDRVLEIAGEKGLYVGLLPTWGDKVDKQWGAGPEIFDEANAREYGRWLGRRYADTPNIIWIIGGDRSGEGKNFTVWKAMAEGIKECDKRHLMTYHPQGEHSSSFWFHDETWLDFNMFQSGHAQRDYAIYRRLLLNDLQKQPIKPVLDGEPRYENIPIDFKSENGRFDDFDVRMTLYQSMFSGACGYTYGCNEVWQMYSDKYSPMIDAQTTWKESLDLAGACDMIHFRKLCEAIDFFRGRPLQYLIERPEQTDDDYAVAYGGKDYVLFYMPYGHSITVNLSGWTQRKNVRLEWFNPRNGELIFYKNIETSEAFEVVSPTQGRGNDWVLIARMKRVVFVVALGLLLCSCSNKVAKTEGKPYGVNMACADFGSNFPGVYNTDYTYPQASDLDYWNEKELKLVRFPFKWERLQYELNGELNRHDLDKMKDFVAAAAERDMVVMLDLHNYCRRYMNGEHTIIGTNGLTPEHLASFWKSLATEFKSFDNIYAYGLMNEPHDLDSCTTWFEMAQLCIDSIRTVDMDTRIMVGGNHWSSAERWIELSDTLKYLKDPADKLAFEAHVYFDADASGTYKRGYDEDSCYLEKGIDRVRPFVEWLKANKFEGMVGEYGIPDSDSRWNLVLDKFLSYLQENDINGCYWAAGPWWPKDEFMAITPVDGKDRPQMEVVGKYLTTQKMKRFITGSSLILVSILSGFPVQAGKSLDEIDREGFAAKYILSELPGISMIQVSSVDTVRSPESLSLDGIWLMAEGGDEKFRLKDVWTDAVEAVVPGSVHTALLMNRIIPDPYIGQNDSIAEQQSYKTWWFSKKFTLNELLENPILSFGGVANRCTVWLNGKKLGSHEGMFGGPDFAVKKYLKKENTLVVKLDPIPQMFLGNWPPNANESWKYTVVFNCVYGWHYAQIPSLGIWRSVKLESQAPVEIEAPFVSTRSLQGDMRLAVTLKKINAPLKGKLQIRIVPKNFEGAPQFFEHEINSSKKTEQFSFDFKIDAPRLWWPNDMGEQSLYDMTVAFIPRNGARPDVEKTSFGIRTIDMAPFPGGEREDRYNWTFVINGKPMFVKGTGWCTMDALMDFSREKYDRLLSIAKSQHIQMMRAWGGGLPETDDFYELCDKYGIMVIQEWPTAWNSHNTQPFDMLQETVVRNMKRIRNHPSLVMWGAGNESDKPFGPAIDMMGRLSLELDGSRPFHRGEAWGGSDHNYNCWWDDAHLNHNLNMTSPFWGEFGIASLPHIESVRRYLAEEKDRWPSRPGDHFRHHTPIFGTMGEFGKLSQYSGYFMPDTILAEFITGSQLAQVVGVRHTLERARTLWPETTGALYYKMNDNYPGVSWSSVDYYGAIKPVHYFVQKSFAPLTGVLLFDRTNLSSQEVSLPLYLLDDCRRLNGKDYTVSVTVYNDRLDTVVCREFNGHSELETVKNLGNLDLNRVQTKSTMLFFVVDVCSEGKRLSRNYYFTNYEVRRGVIMSMPRTEITMKRDGRQITVTNVGKLPAIGVYVESPGYAHEFIASKNYLWLDPGESQIIEVNVDYPVCVKGWNINMKVKKILTFAFAAVLMASMTSCGNEDGPGGDGGNGGGTEHTEYFGVNMSGAEFGNVYPGVDGTHYGYPTKKDLEYFKEKGLRMIRFPFRWERIQSEMNGPLITTELAKMKEFVQAAEDLNMKVLLDMHNFGRYCVYSNGVNSDDNQFVVIGNAQCTVENFCDVWKKLAAEFKDYKCIWGYDIMNEPYGMLRTTPWETIAQACINAIREVDTETMLVISGNEYSSASRWKEVSDGLKNLVDPCDNMIFQAHVYFDWDASGNYSRSYDEDGATIQTGVARLRPFVEWLKENGKRGFVGEYGVPDDDGRWLDILDSALKYLQENGVNGTYWSAGPRWGDYKLAVQPTDNYTVDRPQLATLLKYKTTVQVYMAAWAAVLFAFSACQDVVEVEDLKAKDDIPSNGAPEITKIVLANDKEFEIDGADFEDMVRIEGKNLGNVVSVKFNDVEVDPKEIYARYDMLLAPVPRQLPGEVTDMLYITTKNGSVSRPFTVSIPELKIDGLQNEFTNPGDTTVISGDNFDLYGITVEQADVRIGNAICTVIDATRSDITLQIPANAQPNTDLTIQGGEMAEPVAIPYMNTGHQIFDFNDWPGSGGFTHSSQFPDNTLNFLCDGTEGDGYPEPLNEGMKYLRFHGNVGAWGWMVLWAGYIQVPAEVAADPAAYNLCFEVCTNASYPLNSTTRIALGNFMWMPGASGIPVNTYGGWRTMRIGLDEVSENTILPDGCSPAPDNTEWKIVFTPTDAMDFDLSMCNFRFSKKIGMKKKRLSIYVTMLGLAMATAPVFTSCEDMLEEKPYDFISPDDVPDSDDGADMWTTGVYETLHSSMFRYGNMPRPFDYDCDNVSGATWQFDQFGNGNFQGSNNHCDVVWTGMYSVINRANEAIERINEMKNLTARHRDNVLGECYFLKAWAYFMLVRAYGDIPVYSVSVNQSQQYTNSPRIPIEDVYTQTIIPLLDDAKDMLYKNTDTNFQAGRVCAASAAGLLAKVYATIASAAMPEGEIVTVKTGPQFVMQNINGTNTKVYTEPVPMDFAKDQVAGYESFNSQEYYQLAYDVAKDVKGGVYGTHNLESYDLIWSPSGKTCSEHLFSLQSKSGDELYGTLFTYHYCGMTNEKGHIENSLTVGNSKHWYLLFEEDDYRVDKGVLHCWIREGSDTSWGGGSYFPNFGKWQEMVTNLESPFDNPEVTAGWRCDEGGSEQFFAFTTKYSQQVTDQTLQRTDANYPFLRYADVILIMAEASNELKGPNDEAIGLLNDVRKRSNATPRELKNYSTKSALRSAILEERSMEFAMEGDRRWDLIRWGIYLQAMNALGGTDVCGNVKSRSEKHLLFPIPTLEVLTNQAISSNNPGWSMKRNLFSFPRSQMVGKMLRAMSFVVAVFWATTAMADIVVKGVVADDSGLPIPGANVTELNSKGNGTITNVDGQYSIVVKGPKSVLRFSFIGYTKEDVTVGNKTQIDVQLSEDSKSLDEVVVIGYGTMRKKDLSGAVASIKSEDLMIGNPTSFSQALQGKLAGVQVNSNDGAPGSGMSITIRGANSFSTSSQPLYIVDGIPFDAGSAPTSGANENNNTTSNPLSLINPNDIESIDVLKDASATAIYGSRGANGVVLITTKKGKSGAAKVEFSANFGLSKISKIVESLNAYEYANFVNEATINNALYDNTPYAYLPYRGDWNYRRDPQNNIIPESGTYEPAPEDFLNPGWHEDEYGNREWVEGTNWLDEILQDAFTQEYNISVSGGNDKSHYAFSGNYTDQTGIIRNSGYDRLAVRANVGSQVKSWLNTGLNINFTKSNTRFAKSNSYDYSIIRSAMLYPPTIYVGDHTQDDEYFWLSANPRTYVNTAKDELKSINVFTSAFLEIKFTDWLRFRQNFGMSYTDNERSTYYPRETGEGKNYNGRAGKSDNFYQNITAESVLTFDKTFADIHHLNVVAGFTYENTNWGGKAINASNFPTDITEDYNLSQALTIDAPTSNRGEATLVSLLGRANYVLKDRYIFTASYRRDGSSRFAPGNKFANFASGAVAWVLSEEDFIKNLNIFSNLKLRASYGQTGNQGINSYQTMVSLGSANYPFGGITDSGFAGDTSKGPLNKDLKWETTDQYNVGLDFGFLKNRIALSVNYYYKKTRDLLQYVSIPSSTGFSNMWTNFGHVTNEGIELTGQFYAIDTKDWGLDFDANIAFNRNRIGGLTADQYANNLWYSAKEVFIQRNGLPIGAILGYVEDGFYDNLAEVRADPLYANVSDVEAQRMVGEIKYLDVNGDGKLTTEDRAIIGDTNPDFTYGLTGNFRWKNLTLSLFFQGTYGNDIFNANLTNISMQSVSNIPKFAYESRWTPDNTENAKWPRATMAQTREWRISDRHVEDGSYLKLKTINLAYNFGSPCKGIENLTVFGTVNNVFTITGYSWYDPDVNTFGQDASRRGVDIYSYPASRTFSLGVKVTLMLKKQLFIISLLFGVISSAMAADPVKLYGQLQVNGNQLCSEQGEPVVLRGVSYGWHNLWPRFYNKKSVKWLKEDWKCTVLRAAMGTCIEDNYIENPEHALNCINAVVKAAIKNNVYVIIDWHTYYPQKEEAKAFFSMMAQKYGKYPHVIYEIYNEPMENTWESVKEYATDIITQIRKYDPDNIILVGSPHWDQDLHLVAADPLQGFNNIMYTLHFYAATHKQELRDRATAAWEQGIPIFVSECAGMECTGDGPLDIEEWTRWVEWMEAHKISWVNWSISDKNETCSMLLPRADKNGGWDESLIKPAGRQSRKFIRQYNEAVYRTKKEKKMSNDITITFDDIIKQYRTLDLSEDIFRSMMAEDKQLEADYKEWCDTLGIPERKGFAYYYEEYIEQQDSIWDSLDDHDEMIYNERNIRKEIVLEAAKQIMMAARTAPKGKGVDIIEIITLSHDSLPTLSENMRSEGKKRGMMFFLRDADNIEQADAVILIGTRRHPLGLNCAYCGAKTCGENPESNPCAINSIDVGIAIGSACSKAADLRIDTRVMFSAGTTAQSMNLLPGCNQIIALALSVSSKNPFFDRKFQAPKQMTPNVSFPAEWYPQSGIQLTWPHPNTDWAYMLDEVTDCYKKLASEISQREKLIIVTPCPDEVKKQLQDTIDIESVRFIECLTNDTWARDHGGITVFRDGVPVIYDFKFNGWGLKFAANYDNLITSTLYNENVFNALYENKLNFVLEGGALESDGAGTLLTTSECLLSPNRNGEWTRPVIEEYLKRTFGLQRILWLDHGYLAGDDTDSHIDTLARFADEDTIVYVQCSDSEDEHYEALRKMEAQLQTFTTIGGKPYNLLPLPMPEAVYDENGVRLPATYANFLILNDAILYPTYRQPLNDKKAFEILRQAFPNREVVGIDCSPLIRQHGSLHCVTMQYPRNVLRMTEKKITVGIIQQQNTGDIADNKKRLKQHIEQCAAKGARLVVLQELHNSLYFCQIESTDNFDLAESIPGESTEFYSRIAGELHIVLVTSLFERRAAGLYHNTAVVFDTDGSIAGKYRKMHIPDDPAYYEKFYFTPGDLGFTPIKTSIGTLGVLVCWDQWYPEAARLMALQGADMLIYPTAIGWESSDTPQEQKRQQDAWIISQRGHAVANGLPVVAVNRVGHEPDPSGQTNGIQFWGHSFVCGPQGEILAAAPDDSEWCEVVEIDLTRSENVRRWWPFLRDRRIDSYNDILRRFIDMDTKKNITDKQLALDKRYIRMAQIWAENSYCQRRKVGALIVKDKMIISDGYNGTPAGFENCCEDENGHTFPFVLHAEANAITKVARSNNSSDGATLYVTSSPCIECSKLIIQAGISRVVFSEYYRLQDGIELLQKAGIQVDFIDPQADESIKMNNEKARFVWVPLLIAVAIAGGILIGRFFSAETSFGKTARYDKIESLLQCIEQQYVDTVNRNDLIENVVPKVIGELDPHSAYIPAKDLESVNEELEGSFSGIGIQFNILNDTINVVSVISGGPSEKVGILAGDRIISVNDSAFVGKNISNEKVMKNLRGPKGTTVKLEILRKTAKNPLIYEVTRGDIPVNSVDAAYMLDDKSGYIKISKFGKTTYDEFITALSKLHNQGAENFIIDLRGNSGGLMDAAINMANEFLPANRLIVYAEGKAFEREDAVSNGTGTFQKEQVVVLTDEWSASASEIFAGAIQDNDRGLIIGRRTFGKGLVQQQIPFRDGSAIRLTVARYYTPSGRCIQKEYQLGKSEDYSMDIVNRYMHGEFFNADSIKQNKELVFHTVNGREVYGGGGIMPDIFVPRDTTGVTSYFNNVANEGLLYQYAFDYTDKYRDKLSTAKDVESLLSILEPNTLLNSFVQYAAQKGIRPRPVYINISRKLIVNTLQAYIARNILGEEAFYKLLLRDDETLRKARDIVNKGEGYPELPAENQVPRMSEKRQLRQQVKQLKQTISSEQRVALSQNICSAIEKLPGFETVSRILLYHALPDEVDTGLMLSRWSKKKQLYLPIVNGDNLIVSPYDPRFLKQGAFGIWEPGDTRETDPGSIDWIIVPGVAFDKKLNRLGRGKGYYDKLLVQTSATKIGICYGLQLFDEIPAEPHDIKMDFIITENNIIHRKDELWHMALINAETKLCDVILHEPSVIPVINRFGIILGVGDKSIRTVCEEKNLDCEFFVTILNTFINEDYFPENRLKSFCATQIVNYLTQTNAYYEQFQIPNIERHFNFLINQSDSENNNLELMKQFFDELKKELLSRIENDKNCWFPSIKVAAETLHGEYYGEKFQPDTEENDSLEEKLDDLKSLFVIHLKGEYDLNLCHGVIFAIYSLEKDIKQHNRIRNRILRPIADGMLEACRNKSFKMRIAIVTPYTLLNLGLKHLLQKYFDTTPILYNEISEFFDNAPEQFDAYILFADTIIGYSDFFLPRKSKIILLASDGSHLPETSMTSLDIHESEESLLEKIQQFIEHLDKQSEILPHELSPRETEVLRLVAKGLMNKEIADRLNISINTVLSHRKNLTAKLGIKTVSGLSFYAMMNGYISDIDDKMFYDKRTQRKIQLLNLLIALLILIPILLDFSKGFMMGLNSSVIGFQNGLEESTFQICTVKPDSLQLNHIGTIPSLNLSSDNILYLPASTTPVALSISSVILTGLSFIALICMIIKLVQLIKSVASDGLMNRRNIKRLRLLSYFMITFYLVSYIDSFITTSYYRSHLSLGDNQICYPELSASVTIAFILLLLAEILNIAYKQREELDLTIMPIIVNLDVMMAKRKISLNELSGKIDITPANLSILKTGKAKAIRFSTLEAICKELNCQPGDILEYQDEENTIMNLKMVKSGLVLACVALAQWVSAQQAPQMEALPIDPNVRYGVLDNGLTYYVRHNETPKNRAEFHIAQKVGSILENEDQRGLAHFLEHMAFNGTEHFPGKNMLNYLENKGIKFGVDINAYTGFDETVYRISNVPTQNQNLVDSCLLVLYDWACAISLNDKDIDEERGVIHEEWRTRADANWRTWEVTVPVMFAGSQYANRMPIGTMEVVMNFPYQALRDYYHKWYRPDQQGIIVIGDFDADKMEAQIKELFGKIKMPENAAERIYYTVPDNKEPIFAFHKDKEATYTRVDIYMKHDPMPREMRGTINGAINDYMGQVVGIMFNDRISEITQKPDAPFIAGAIFDGDFFVSKTKDAFTLIALGKDNGAIDAIKGIMREAERIDRFGFTASEYDRARATLLSRYENMYKERNNHKNIDYAEEYIRHFIDGGYIPGIEMEYNLLKQISPAITVDMVNQYIKTLISEDNMVISLTGPDKEGVSYPDKDQVLAAIKEVEAEEITPYVDNVSNEPLISDEPVAGKIVKSAAGKKFGTTEWTLSNGVKVILKPTDFKSDEISMQAVSKGGLSLYDYTDRALVKNLKAVNEIVELSGLGKYGRTDLMKALAGKTVSTYFSLGEPMEMINASCATKDLETMMQLVYLTFTDIHRDEDAFAAWKEQMKAVLTNYANDPQFIFSDSLSATLYNHNIMREPLKAEDIDLINYDRILEIAKERTANAADYTFIFVGNFDIDSLKPVVEKYIASLPANKNRDKVGKISTIQPGLIDNNFTLPMQTAKSTVYAVYSGKQKYDLRSNIMFSMLDQIMDIVYTETIREEEGGTYGVGTSSNLSPVNNSWLFLFGFDTNPQDEKRLTERAHAELNKVVTEGPREKDFNKVKEYMLKQHAQNLRENSYWMNIIKSDVLGYGDNNTDYENIVNGITLDDMKKFTKKLFNGKNIIEVTMTGVVEDETKMKKVIEVPFVAGLCDKPLSQVSEILEAQGVRQAIDCVDWPNEFPYKPITSFYIARDKECLYINYFVKGNYLRAVNSTDNSPVWEDSCVEFFVQIPGEKYYYNFEFNCIGTALAARRTGREDAEHFSADKMAKIKRYSSVGNKPFCEMEGLFSWNLLVAIPFELIGLDGGQLPESLSANFYKCADGSSLPHYLSWSPIPIEKPDFHRPDYFGELRFRMDLTLYTIIRGLAIGILVSAPMGPIGILCIQRTLNKGRWSGFVTGLGAALSDLIYALLTGLGMSIVIDFIEANQNILQILGSLVLVGFGLYLYRQNPAKNIRKANSSINTFTQDFITAFLLTFSNPLILFLYIGLFARFNFFLPESQLGHHVVGYLSILLGAVSWWFLITYVINKVRARFNVRSIWLINRGIGIIIIIMSIVGFVWGIKDYFLYNLMSCFLVACLFFFFPTEKSRQRKRIYFRCKIKEKPSSTQKKMVIFFKTSVQNIIAVQADHSFSADETKKLSWLFDNAELLPASTLKGWFIGPRKEMITPWSTNAVEITQNMGLTGISRIEEFFPVTDGSAEFDKMLQRLYNGIDGKIFDIDKQPDPIVYIDDLAAYNEQEGLALSPDEINYLNDLSKKIGRKLTDSEVFGFSQVNSEHCRHKIFNGVFIIDGQEKESSLFKLIKKTSEYNPNRLVSAYKDNVAFNAGPTVEQFAPINPQQPDFFEIKDIKTVISLKAETHNFPTTVEPFNGAATGTGGEIRDRLGGGRASLPIAGTAVYMTAYPRTEEGREWEEDSMQPRPWLYQTPEQILIKASNGASDFGNKFGQPLICGSLLTFEHAENGKKFAFDKVIMLAGGVGFANMRDALKGTPVAGEKVVVMGGDNYRIGMGGGAVSSVETGQYDNAIELNAVQRANPEMQKRVSNVIRAMSEAEENPIVSIHDHGAGGHLNALSELVEETGGLIHMDQLPVGDPTLSAKEIVGNESQERMGIVIREEDIEHIRQIADRERAPFYVVGETTGDHRFVFEQTDGVKPIDLAMEDMFGKAPRTVMTDRTVEETYEDVTYDQTQLDEYVERVLQLEAVACKDWLTNKVDRSVTGKIARQQCQGEIQLPLSDCGVVALDYRGRAGIATSIGHAPQAALVDPAAGSVLSIAEALTNIVWAPLSEGLDSVSLSANWMWPCKNEGEDARLYRAVEACSDFACSLRINIPTGKDSLSMTQKYGKDKVYSPGTVIISAGAEVSDIRKVVSPVLRTGVNSTIYYIDFSFDKLKLGGSAFAQSLDKIGKEVPTVQDSEYFANAFNAVQELINKELILAGHDISAGGMITTMLEMNFANTEGGLEVSLDEIPEKDLVKILFSENPGILIQVEKTDEVEKILKKAGVAFIRLARPCDERHLLIHKDGADYQFFIDHLRDVWFESSYLLDRKQSGEKAAKDRFLNYKEQPLQFRFPDSFTGTLAQYGISADRRTRSGVKAAIIREKGVNGDREMAYSLYLAGFDVKDVHMTDLISGRETLDDINMIVYCGGFSNSDVLGSAKGWAGGFLWNEKAKAALDRFYNRPDTLSLGICNGCQLMVELGLLTPDHEQKPKMRHNDSHKFESQFIGLTIPENNSVMFGSLSGSKLGIWVAHGEGKFELPYAKERYNIVAQYTYDAYPANPNGSPYGIAGIASADGRHLAMMPHLERAIFPWQCGHYPADRKTDEITPWIEAFVNARKWVEQHTKMGGFFGSIKKESCVTDLFYGVDYNSHLGTKRAGIVTYENGVFKRAIHNIENSYFRSKFEAELPEFSGNSGIGVISDTDAQPIIISCHLGKFAIVTVAKINNVEELEKELLASGNHFSEHSNNIINQSELVSMIISQGKDYVDGIRLVQEKIKGSCSMLLLTEQGIIAARDKYGRSPILVGRGDNGYAVSSETCSFPNLGYELCYDIRPGEIVRLTADGYESLNQPGKKMQICSFLWVYYGYPACEYEGKNVEEMRFHTGFEMGKKDDIEADFVSGIPDSGVGMALGYAVGKQIPYRRGIVKYTPTWPRSFTPSNQAMRELVAKMKLIPNKSMLDGKRVVFCDDSIVRGTQLRDNVSDLYRYGAKEVHMRISCPPLLYPCKFLNFTASKSEMELITRRTIAEIEGNPDKNVAAYARTGSPQYNCMVNCICKKLNITSLKFNPLETLVESIGLPKECICTHCFDGSSYEMSLKIVVLAKQVPDTRNVGKDAMKEDGTINRAALPAIFNPEDLNALEQALQLKEQNPGSTITLLTMGPPRAAEIIREGLFRGADGGIVLTDRAFAGADTLATSYALSCAVRKIKDYDIILGGRQAIDGDTAQVGPQIAEKLGIPQVTYAEQILNIENGKATVKRRLERGVETVVVPLPAVITVNGSADECRPRNAKLIQRYKYAKTPSEKQGLSEECLKLYEQRPALNLYEWSVNDVDADLDQVGLAGSPTKVKAVQNVVFQAKESKRLTAADNEIEDLVKELIANHTIGMNNLIVYCEIEDGIIADVSLELLTKGRSLANQLNCKLEALVIGSNLDGVEKQVFPYGVDTVYTVDDPRIYPYTSLPHTSVLVNLFKEQKPQVCLMGATSIGRDLGPRVSSSLHSGLTADCTALEIGPHEDKKNNKTYENLLYQIRPAFGGNIVATIVNPECRPQMATVREGVMKKEIYDPAYKGEVVKLDPKKYVSDTDFVVEVIDRQMEKSKANVKGASIIVAGGYGMGSKENFDMLFDLAATLGAEVGASRAAVDAGYIEHERQIGQTGVTVRPKLYIACGISGQIQHIAGMQDSSIIISINSDPNAPINTIADYVITGTVEEVIPKLIKYYKKNSKMANFYLDNSDLKHHLNHPLMKKLVALRERNYSDAEKYDYAPFNFEDAMDSYEKVLEIAGEISGEIVAANAEDVDHEGPHVVDGHVVYAKGTQKNLDALVKAGLMGISIPRRYNGLNFSLVPYIMAADMVSRADAGFVNIWGLQDCAETIYEFANEEQKQKYLPRVCAGETMAMDLTEPDAGSDLQAVMLKATYSEADGCWYLNGVKRFITNGDGHIALVLARSEEGTKDGRGLSMFIYDRNDGGVTVRRIENKMGIKGSPTCELVFKNAKAELCGSRKLGLIKYVMALMNGARLGIAAQSVGVSEAAYREAIAYARDRKQFGQAIIEFPAVFEMISLMKAKLDASRSLLYETTRFVDMYKAYEDIAKERSLEPEERAEMKAYQKLADAFTPMAKGMSSEFCNQNAYDCVQVHGGSGFMKDYACERIYRDARITSIYEGTTQLQVVAAIRHVTTGTYLHQIEAYEAAEIAPELEPLRDRLKAMKAAYVKAVETVTATKDNEYIDFQARRMVEMAGHVIMGHLLLNDATRNESFRQSAEVYINFGEAEVAKHAAFIERFNPEMMAAYRKMSHTPQCSGIRQGRSGIILNFRYKKEVFHLSGIPPRMIMLLGSPLYFAAQKHPAMLRDTGEEGEMYFPFASAPILMCYKGLSFSAKESPCYTNSLYLFILLNSEKNEPRSAAAVIGLLGSSLRSPSGSAELASLGQSSPFFLRLSYDFTDRMISKFFINRPIFATVIAIVMVLVGLVTIYTLPVAQFPDITPPTVQVTAVYPGASAETVAKTVGVPIEEQVNGVDGMIYMSSSSSSSGQYTLTVTFEVGTDIDMATVLVQNRVNIAQGNLPEAVIQQGIITKKQSTNIVMFLALESDNPLYNSLYLSNYAKLNITDELSRLPGVGGVTVFGADNYSMRIWLDPELMRIRSLTPADVYSAIQAQNMEVSAGSVGQPPTDTDEAFQFTLVSKGRLSTPEEFGRIIIKSLPGGEYLRLRDIATIDLGSATYNTTSTINGKETAAIAIYQLPGSNSLDVAKAVKAKMMDLSRYFPNDVQYKVVLDTTQFVSASIDEVLVTFVETSLIVMLVILIFLQNFRAMIIPSLTIPVSLIATFAVMKLMGFSINTLTLFGLVLAIAIVVDDAIVVVENSTRLIDTGKYSRKEAVEKAMEEITSPVIGVVLVLLAVFIPTAFIGGITGELYKQFALTIAVATVFSGFNSLTFTPALCALFLQPTREPSFFLYKWFNKGYGATLNGYVKVIGSMLRKPLVSLSAFIVLALAAFYGFAKWPTSFIPQEDQGYFIVSVQLPNAASMERTRKVCDDLNRIIQSYPEVENALNIVGFSALQGGSSSNSATFFVVLKPWDDRKGKEHSVFNVVERLNRDASVLQEAIVFAVNPPAISGLGVSGGLEMQLEDRSNLGAGELESAANALIGNIGSEPALMQINSMFQGNTPQYTLNIDRDKVEMQGLTLSSVFSALSYYMGSAYVNDFVEFGRIYQVKLGAQAGARAHIDDVMKLSVRNRDGSMVPFSSFTQVEEMMGLNLVSRYNMYSSAALTAIPAPGISSSEGMAAMERLVRNTLGTNFGYSWTGEAYQESQSGSTVGLIFGLAILIVILVLAAQYESWTNPIAVILSLPTAILGTVLGCIVMSLSISIYSQIGLILLIALSAKNAILIIEFAMDYRKQGESIRQSAMEAGRLRLRPILMTSFAFIFGVLPLMFATGAGAESRIALGTAVVFGMAMNTVLGTLFVPNFYELMETVQERWLSKVFKDSGEKGTPDSADMRRLFSYMPIVAVAVLFSLFSCQSKKGEKQSGDVRLPEISVAYPAVDSVVLIKSYPGYLTSLQTVDLVARVNGYLQQVAYTPGEIVKKGQLLFVIEPSQYEDAVEQAEAALKTAQAQYDYAENNYTRMKEAAQSDAISTIDLIQAESKLEQSRASVRNAEAALSTARIQLGYCYVKAPFEGRISRNLYDVGNYISGSLQSTKLATIYQDKKMYAYFNIEDNQYLKMLLNQSKGKHSVPSDRVEILFQEPTSRSYYGRLDYLSPNVDLSTGTLSIRAEVDNPAGELKSGLYISIRLPYGSREHAILVRDASIATDQLGKYMYVVNDSNVVEYRPVETGQLVNDTLRVIDEGISPTDRYVTKALLKVRAGMPVRPVLEKNMCKVFFIRSRLVASVLILLCGGAVYAQQPATRYLSDDIPKAWTPDTLFSQQLPPEDLWWSEFNDACLDTLIQEAVDSNHNLLAAADRIRMARAAWRMEQSGFYPSVNFSAGWTKTRNSGYLGREAADNTYSQYASGDLSVSWEIDLFGSIRQRAKAKKELFRASRDEYNGTMVSLCAQVATAYMTLRTYQQQYIVAESNIQSQRSILHITEVRYETGLASQLDVSQAKTVYFNTKASLPSLEAGIEKQINIIAILLGKYPDELRPMLRTTKPLPDYQRLVGIGIPMNLLRRRPDVRQAERTVASYAASVGAAKSDFMPKLYLNGSIGFASRDMDHFFNKRSVTYQLAPTVSWPLFQGTQRIQALASARAQLDSGIEQYNQTVLTAVQEVENAMNSYTHIVKQISMLKELVAEGEKTLSLSLDLYKRGLSGFQNVLDAQRSLLSYQNSYVSAQGNAINALILLYQSLGGGWIDSSQPMMTNDKYTRLVKLQKAFFNEHITREIPFRLCALDRLAEALVSREKQLGEALHADLGKSAFESYATEIGFLLHEIRTTKNHLQSWARDRHRPTPLFLFGSKSRIHYEPYGCTLIIAPWNYPLQLALSPLIGAIAAGNCAIVKPSGEAPRTAAALQELIDECFEEEYIAVTDADRETTELLLQERFDYIFYTGSVEYGRHVMQAASRHLTPVTLELGGKSPCIVDDDADLKAAARRIVWGKFLNCGQTCVAPDYLMVHRKVQDKLTEHIRDEITRQYGENPQQSPDYPRIVNARHFDRLSALLSHGTMLCGGTNDPSDRYMAPTLLTDIPPQSPLLTDEIFGPILPVLPFDDIDDCVEYVNDREKPLALYYFTRSKKRARYMIQHTTSGGACINDTIVQTANGNLPFGGIGNSGMGAYHGRESFETFSHCRSIVNSSLHLYPNFKFPPYADKLKWLKRLMKMINNEYLYHFTSSENLIRILETMSLKLSDFKKLNDLNENNIPHYYFINGRRLAQTKNYIKNHCKILCFSQDYLYKHRLLSGINHPRMWAQYAQNSTGACIIINENLFLKQNENILKTTFYKIENIEYTDKLYNISKPNPIYSSPEELLKCHYKDIFYKKHIDWEQEHERRLFILNIPEIQFLSIKNCILYICLGSNFNKYDKLRETIHKLESKCFNQDNHLLFLSQYNMDGNISEGPLVNQLKYSNSKKNEMKSQGRRRKKGEDCPSGASSADPDGDRSDEPKSPITAAALLGSFFSLLRRMNKMIDTRFETTIDLRGEIENYRQVALIKYYKILLELDPRRDRLTMLAVIRCIDKLERHSQERKRPRNDKKKMLAEGTLAWHYQKRNQLFRKAGLYDIESTQFLVDHEEIFDTHEEREERERFEACRREALRRKTETHEAEEKESVQPASAHETDKDLQEDYTTAGSGIPAHTPQPLSPLSGSIWCGAPAGNPIGEPAPGFHRSSFDCNRREMRFALFVHSSQQREERTKKRRRGYRAFGFVTMVAVGVCGTRFARTVLALFPPSSLMILKKIDNTQTKPRLVSINPLHYLCTKQRKRKVEQDFLNSLNDQQREAVLYTDGPELVIAGAGSGKTRVLTYKIAHLLQMGYPPYRLLALTFTNKAANEMKERIAALVGTETAQRLWAGTFHSIFSRILRANADRLGYRHDFTIYDASDSLSLIKSIIRELQLDDKTYKPTTVQTIISQAKNDLTDPQAYARNRERVEWDTRSKRPLIHKIYQRYQQRCSVSGVMDFDDLLLNTNILFRDHPDVLQHYRNLFAYILVDEYQDTNFAQHHIVSQLGKDHNHICVVGDDAQSIYSFRGANIHNILGLSKEFPGLKIFKLERNYRSTQNIVNTANSLIAKNKEQIPKQVFSEKEQGNKVQVISAYSDFEEGFIVSNRIAEMRLTTHCDYNDFAVLYRTNAQSRELEEALRERNIPYRIYGGMSFYQRKEIKDAIAYFRLTINPDDEEALKRVINYPARGIGNTTLSKLIERAHSQESSIWKVISDPIGHNLAVNNGTLNKLKTFKDLIDELRYEADKKNTPELAETIIKRSGIWGEISSDRTPENINRQENIEELLNGVRKFCVGRKEAGEEQTSLSDFLAKISLATDQDNGDETEQDKVTLMTVHASKGLEFKQVFIVGVEEDLFPSAMSKNSEREIEEERRLLYVAITRAGENCTLTYALSRYRNGQTVFPSPSRFIKDLDSRYVDMPVQTKQESPRETISWNRFPFDTERPRKTSRWNEEDTDRTPAPRPFAAPSPGKRLTKIDSKPTGETHSTTQSTVTTAAGQVEIGTFICHARFGNGTVTAIEDTGDNCKITVEFENVGRKQLLLKFAKFTIIEMHDTLSQIPSPCYVLEEELLRRNLALIRSVKEAAGVNIILAFKAYALWKSFPVIREYIPHSTASSIHEARLAFEEMGSPAHTYSPAYTERDFPTILKYSSHITFNSLTQFERFYPQVVADGNRVSCGLRINPEYSEVETDLYNPCAPGSRLGITADKLPELPQGVEGLHFHTLCESTSYDLEKTLAQVENRFGHLLPHIKWLNMGGGHLMTRKDYDTAHLINLLRGFKQRHPGLEIILEPGSAFAWQTGTLVSTIVDIVENHGIKTAILDVSFACHMPDCLEMPYKPAIRGSVEPAPGTYAYRMGGNSCLSGDYIGDWHFDHELQIGDRIIFEDMIHYTTVKTTMFNGIPHPSIACLKSDGKAEIWREYDYYDYKTRMDMGTFLGIVALLITLVAFIPLLGFLNWVAIPISVIFLIICAILKSDNGKTLCIVSIVLGILRLMLGGGIFMKTVYKSKVDKGLLIAIIAIVLLSYLPLLFEFSWIALALLVVTAAFIADPFCNTSYTIDNGTLHIKCGIFLSSSFPIDRITKISKTNSCLSAPALSMDRIEIRFADKKTLVLSPKQRQAFIDHLRSLNPDIVVKPPLMEPLGICRTAFYVSKKIMCAVLIVFSLRGRAQSSVMMEKETCAFLQSLPAGLQKTQADAVRRAINGDCTALISVRNSRNTNPESKSGVVAADIGGCYRLYRPAGFDTIPLPVLIYLHGGGWCFGSINSCAHFCAGLSYRAKIAVLAVEYPLAPEHAYPAALNACTEAVAFAFEHAGEYGFLPDRISIGGDSSGGNLALATALNLILAKDSHSCRMDSGTMCSSLCSLVLFYPVTKAWADGSSSWKNYAEGYGLDAQLMEAFNAAYIGTGDARQPLVSPGVADDELLKQLPPTLIVNAERDILLCQGKELAARLSGLGVAVSHTVLPHTVHLFITVPGQPTAFGESVRLAADFLTLEMIRFQICSSGILNTADGLIDYEILSKQKAIVYIQNKQFIFIMKFKILVPLLCLCFLSSCYTSQLVSKFSGTQVELGMSQNEFIQKFGKPFNKEMAYTYDKHKRETLFYKEDLYRGSWFIVTTAFTFVDSKLVSQEIVREERQFNHEEHPRREKHQSSTTCPRQNFLLSCTNIMDRFSEYRIMWVLVFFDLPTESKRERKLYADFRKKLLQDGFTMFQFSIYVRHCPSRENADVHIRRVKLSLPPFGKVGILCVTDKQFGMMEIFYGKKEVKPQVLPQQLELFMIKRTLYFGNPSYLSLRNAQLVLRLPEVSNNDTLPDTFKKEAERTIPVEDIGVVVLDHSQITITQGLLEALLENNCAIITCDKSRLPVGLVLPLCGNTTQNERFRDQLNASLPLKKQLWQQTVQQKIANQAAILESRGIVAKNMRAWVGEVRSGDIDNMEARAAAYYWSSIFPHLDSFRRDRDGDPPNNLLNYGYAILRAVVARSLVISGLLPTLGIHHHNRYNAYCLADDVMEPYRPYVDGLVCEIMESGKDYSMLTTELKAKLLSLPVVEVGIQGRRSPLMVAVAQTTASLYKCFNGELRKIIYPELMKNILGLDLGSNSIGWAIVKALKNEDGKEILQSIDLAGSRIIPMDQATLGNFENGNSVSQTRERTGYRSARRLRERYLLRRERLLRVLNCMGFLPEHYSQNIDKYGKFFLDNEVKLSWKKDKMGKNEFIFLDSFNEMLEDFRHSQPQLLLDGRKVPYDWTIYYLRKKALTEKISKEELAWILLNFNQKRGYFQLRGEDEEVQGKKIEFYALKVVRVEDTGEKKGKDTWYNVYLESGLGDTDDYWVYRRASSVPIDEWEGQVKEFIVTTTLDNNGSPQIDKEGKVKRSFSIPKPEDWMLVKKKTEVDIKSSGKTVGTYIYDTLLQKPDQKIKGKLIRTIERENYTNELSLILENQKKFHLELQDRELYHQCIELLYCKNEAHKRVIGTWDFTSLFIKDILFYQRPLKSKKALIDNCPYEESFYIENGEKKSKPRKCIAKSHPLFQEFRIWQFISNLRIYQKVKEVDGKLQFNVDVTSDFLRDESAYVELFKWLNERAEVSQEDLLKHLGLKKTKTEDTVSLYRWNYVEDKKYPGNKTRSSILKKLLNDEKEALSEDIELKIWHLLYSVSAQSEIDKALSSKNVSTKGIYSGLSVYFSDETIQKIKNVKLESGYGSYSAKAIGKLLPLMRRGKYWNLESIDNHTKERIEKILNGECDETIRARTREKSISLTDISQFKGLPLWLACYIVYDRHSELKTIKKWNGPEDIDKFLKEFKQHTLRNPIVEQVIMETLRVVRDIWRRVGSIDEIHIEMGRDMKQTAQERARRSAIISRNENDNLRIKALLHEFMNPELGIENVRPYSPAQQEILRIYEDGVLSSVSEIEDEIKNILKKFNESEEGKRPTKNEIIRYKCWLEQKYRSPYTGEIIPLGKLFTPAYQIEHIIPQARFFDDSFTNKVICEAEVNAKKGDLLGYEFVKEKGGEIVELSGGRNVRIFSVEEYEDFVKEHYKSNKQKMQRLLAEDIPTEFSHRQLNDSRYISKYIRNLLSNIVREDDEQESVSKNVISCNGAITDRLKKDWGVNDVWNHIILPRFVRLEEIRADNGEKFTAFNQEGHLIPSMPLMYQKGFNKKRIDHRHHAMDAIVIACTTRDHVNLLNNECSNTQNNANKHQLSRKLRRYENVSYKQDGKLKEREVPKEFLKPWEEFTRDVEFALKNVIVSFRQNLRVLNKTVNYFQHWKDNSSEKEWKEQKSADHWSIRKPLHKETVSGEVFLWRTRFVSLREALTNPKRIVEKDLRSKILELQSKGYDTKRIKKYFEDNKDVWQDVNLSKIEVRYYSREIVDPQTELPKNRYFATRFGNDLISLFSGVSNFEKAKKIIESITDTGIQKILFRHLENKGNDPVLAFSPEGIDEMNRTIKTLNNGKDHKPIYKVRIYECSTMKFPLGSVGNKSKKFVEAAKGTNLYFAVYEKEVENDRGECHKERTFKTIPLNDVIRNLKQGLSIAPNDENGNPPAFILSPNDLVYLPTKEESETDSISQPLDRNRIYKMVSCTGYQVFFVPAFVAAPVLQKIELGSNNKSERARTDEMIKESCIPIKVDRLGMLISINGKAVSRQLIEERAGEGEPLRLSLFLYIGLATTPGPIQKSEKFNLTGGVSLHR
